United States Patent Application Publication US 2024/0132992 A1 - sequence listing, part 4

SEQ ID NO: 2 - DNA, 6856497 bp, Pseudomonas sp. BR8764 (residues 5,142,376-6,856,497 of 6,856,497)
aggtcttttcctgagctaataggagtccgttttgactcttaagttgctcgacccgatcaattagcagttcgagtctggccatcagcgcttgcaggtcggtgtcttccattgggttccactggatttgtctgatgaatggcaacttcaggataaacgatctgacgcccttgatagtcttggtacgtctgccggtgctaggatacagcgctccattctagacattgcgccgtctggcgcctagctcaccatgcctattcagaactccccgtacgacgctttttccaaactgctgagcaccagcggtcacccctgctcgcctgctgaactgcacggtgtgttgctgggccgcagttgcaccggcgttggctttgatgccgacaactggctggccgacgtggccgagctgctggaaaccgaaccgaccgagaatgtgcgaaacgcgctgatcggcctgcaggaaatggtcaagggcgagctcaccggtgatgacgtcaccgtggttctgctgctgccgaccgacgacgcaccgctgaccgaacgcgccgccgcgctgggccaatggtgccagggtttcctccacgggttcggcgtcaatgccggcggcctggagctgagtactgacgcaaaggaagtgttgcaggatttggcagccatctctcaggtgcaagatgccctggaagagtccgaagatggcgaaggcgattacatggaagtgatggaatacctgcgcgtcgcgccgctgctgctgttcaccgagaccaaaaagtctgctgaacctgcttcgcccaagccgtcactgcactaagaagggaagcccatctgcccatgatccatatccccaaagcggaatacacgcggcgccgcaaggcgctcatggcgcagatggaacccaacagcatcgcgattttgccggccgccgccgtggcgatccgcaaccgtgatgtggaacatgtctaccgccaggacagtgacttccagtacctcagtggcttccccgaaccggaagcggtgatcgtgctgatgcccggtcgccagcatggcgagtacgtgctgttctgccgcgaacgcaacgccgaacgcgaactctgggacggcctgcgcgccggcaccgaaggcgccattcgcgactttggcgcggatgacgcatttcccatcaccgatatcgacgacatcctgcccggcctgatcgaaggccgcgaccgggtgtattcggccatgggcagcaatgcagaattcgaccgacacgtgatggagtggatcaatgtgatccgctccaaagcacacctcggcgcccagcccccgaacgaatttgttgccctggatcatctgctgcacgacatgcgcctgtataaatcggcggcagaagtgaaggtaatgcgcgaggccgcgcgaatttcctgcgccgcccacgtcaaggcgatgcaggccagccgcgccggtttgcatgagttcagcctggaagccgagctggactacgaattccgcaagggcggcgcgaagatgccggcctatggctccatcgtcgccgccgggcgtaacagctgcatcctgcattaccagcagaatgacgccgtgctgaaggatggcgatttggtgctgatcgacgccggctgcgagatcgactgctacgccagcgacatcacccgcacttggccggtcaacggcaagttttcgcctgaacagaaggcgatctacgaaattgtgctggcctcccaggaagccgcctttgcccagatcgcaccggacaagcattggaaccaggcccacgaggccaccgtgcaagtcatcaccgccgggctggtcaagctggggctgctgcaaggtgatgtcgacgagttgattgccagcgaagcctaccgcgccttttacatgcaccgcgccggccactggctgggcatggacgtgcacgatgtgggcgaatacaaagtcggcggtgagtggcgggtgctggaggtcggcatggcattgaccgtggagcccggtatctacatttcgccggacaaccagaacgtggcaaagaaatggcgtggcattggcgtacgcatcgaggacgacgtggtagtgaccaagaaaggctgtgaaatcctgaccggcggcgtgcccaagaccgttgccgacatcgaagcgttgatggcggccgcccgatgagccggatcaacctggcgattatcggcggtggcctggtcggcgccagcctggcgctggccttgcaggccggggccaaggcccgtggctggaagatcgtgctgatcgagccgttcgccccgggtgacagctaccagccgagttatgacgcgcgctcttcggcgctgtcgtttggcgcacgccagatttaccagcgtttgggcctgtggcaggaaatttcccgccgcgccgaaccgatcaagcagattcacgtgtcggaccgcgggcgtttctccaccgcgcggttgtccgcgatggaagagggcgtgcccgcgctgggttatgtggtggaaaacgcctggcttggccagtgcctgtggaaaggcctggataaagaagtggtcagttggcgctgcccggcggaagtcacgcgcatggaaccgctgcccgacggttaccgcctgacgctcaatgatgaaaccgtgctggaatgcgatctggcggtattggctgacggcggccgctcgggtttgcgcgagcaactgggcatcggtgtgaaaacccggccgtacaaccagagtgcgctgatcgccaacatcaccccgagtgaatcccacaacggcgaggcgttcgagcgtttcaccgatgaaggcccgatggctttgctgccgctgccggacaaccgctgtgcgctggtctggacacgcattggcatggacgctcagcgcctggccaatctcgatgaacgcagctttctcagcgaattgcagggtgtgttcggctaccgcctgggcaccctgaaacaagtcggcgcgcgccacttgtatccgctgacgctggtggaagccgaagagcaagtgcgctcacacctggccgtgctcggcaatgccgcccacagcctgcacccgattgccgggcagggcttcaacctgtccttgcgtgacgcgaatgctttggccgaagccttgctggccgggccgcaggtgccgggcgatttggccaccttgcagagctatcgcgagcgtcagcgtctggatcagaaactcaccgtgggcttctccgaccaagtgacgcgcctgtttggcagcgctcaacccttggtcgcgctgggccgcaacatgggcctgctgggtctggaccttttgccgccggccaaacgctggttcgcccgtcaggccatgggcctgggcacgcgccccgatgcgtaactggctgacccggcgcctgggcaaggcgcgattgttgcgctggttcctgaacctctacccgccctatctcggcgcgggtgtgcgcgtgcaggtactgagcgcggattttcgccacgtcaaagtgcgtatgggcctgggctggtacaaccgcaactacgtcggcacccagtttggcggcagcctttattcgatggtcgacccgttctacatgctgctgctgatggaaaacctggggcgtgactacatcgtgtgggacaaggcagcgagcatcgacttcatctcgccgggcaaaggcccggtgtacgccgagttttccattgacgaggccttgctggacgaggtccgcaggcaaaccgcaggcggcgagaagtatctgcctcacctcaaggttgagattcatgacggctccggcactttggtggcgcgcgtcgacaaaaccctttacgtgcggcgcaagccgccagcaaagcaggcttaaagcatggacatgcgcgcagatgtgctgattgtcggggccggaatggtcggaagcgccctggcgctggcgttgcagggcagtggcctgcaagtagtgttgctggacggcagcccgctgagcgtcaaaccgttcgaccgtgacgcggctttcgagccccgcgtgagtgccttgtcggccgccagccagcgcatccttgagcgccttggcgtgtgggacggcatcatcgaacggcgcgccagcccttacggtgagatgcaggtgtgggacggcagcggcaccgggcagattcacttctcggccgccagcgtgcatgccgaagtgcttgggcatattgtcgagaaccgcgtggttcaggatgccttgctcgaccgcctgcacgactgtgatttgggcttgttggccaatgcacgcctggaacagatgcgccgctccggcgatgactggctgctgacgctcgcggatggccgcacattgcgcgcgccgttggtggtggctgccgatggtgccaactccgctgtgcgccgtctgaccggcaccgcgacccgcgaatgggattacctgcataacgccatcgtcaccagcgtgcgcagcagccagccgcaccagcgcacggcgtggcagcgttttaccgacaccggcccactggcgtttttgccgctggcgcgggacgggcaagaggattggtgttcgatcgtgtggtcgaccacgccggctgaatccgagcgcttgatggcgctggacgatgaaaatttctgccgtgaactggagcgcgcctttgaagggcggctgggtacggtggtgagcgctgacccgcgcgtctgcgtgccactgcgccagcgtcacgccaaacgctacgtggccgaaggcctggcactgatcggcgatgcggcgcatgtgatccacccgctggcggggcagggcgtgaacctgggcttcctcgacgcggcgacattggccgaagtgctgctggcggccactgagcgcggcgaacgcctggccgatgtgaaagtgctgagccgttatgagcgtcggcgcatgccgcacaacctggccttgatggcggcgatggaagggtttgagcggttgttccaggcggatcaattgccgctgcgctggctacgcaacgccgggttgaaaatggtcgaccagatgcccgaagccaaggccgtgttcgtgcgccaggccctcggcctgaccggcgacctcccggacctcgccaaaccctgaacctggaatgcaatcccctgtgggagccgggcttgcccgcgatgaggccatcagccccaccgcaaattccggccgcgcaacatctcgtaacgcctccaccaagcgccaccaaatgtgagtccttatcatttgcgctccttcgttcacgagagaccgcacccatgtcggcacccaagcgccttctgactgccctggcactcaccctcatcggcagcagcaccgcacaggcagccgacgaagtggtggtctactcctcgcgcatcgacgaactgatcaagccggtgttcgacgcctacacccaaaaaaccggcgtacaggtgaagttcatcaccgacaaggaagctccgctgatgcagcgcatcaaggccgagggcgaaaatgccactgccgacctgttgctgaccgtcgacgccggcaacctttggcaggccgagcagatgggcattctgcaaccgttcacctctgacgtgatcgacaagaacattcccctgcaataccgctcctcaaagcacgcctggactggcctgagcctgcgcgcacgaaccatcgcctattccactgcgcgggtaaaaccgggcgacctgaccacttatgaagccctggccgacaagcagtgggaaggccgcctgtgccttcgcacggcgaaaaaggtctacaaccagtcgctgaccgccaccctgatcgaaacccatggcgcggccaagaccgaagaaatcgtcaagggctgggtcaacaacctgtccactgacgtgttctccgatgacgtggccgtacttgaagccatcaacgccgggcagtgcgacgtgggcatcgtcaacacgtactactacggccgcctgcacaagcagaagccggatctggcagtgaagctgttctggccgaaccagggcgaccgtggtgtgcacgtgaacctttcgggcattggcctgaccaaaaacgcgccgcacccgcaagccgccaaggccctggtggagtggatgaccacgcctgaggcgcagaagatctttgccgatgtgaaccaggaattcccggccaacccggcggtaccaccgtcggcggaagtggcgacctggggcaagttcgtggccgataccttgccggtggaagtggcgggcaagcgccaggctgaggcgattcggttgatggatcgcgctggctggaactgaaaacgccacagttccaaatatgtgaactggcttgtgtgggagctggcttgcctgcgatagcatcacctgagtatcactgatactccgaggtgtctgcatcgcaggcaagccagctcccacattggtttgtggtgacttcaagataacctttcacgagaacagtcccttggcccaccccgcccaacgccgctggtacctgccggtgttcaccgtcgccgccctggtgctgctgccgctgagcgtgctgttgctgtcctggcaaagcattgatgcacaaatctggtcccacctctgggacacccagatgccgcgcttgctgggcaacaccctgaccctggtgttgggcgttggcgtgggtgtgactgtgttgggcgtcagcctggcctggcttaccagcctctgcgaattccccggcaggcgctggctcgattgggcactgatgctgcccttcgccatcccggcctatgtactggcctttgtatttgtcggcttgctggacttctccggccccgtgcaaaccctgctgcgtgaatggttcggcacggggttgcgcttgccgcgggtgcgctccaccagcggcgtgatcatcgtattggtgctggtgttctatccctacgtttacttgctggcgcgcaccgcgtttctggcccaaggcaaaggcttgatggaagcggctcgcgtgctgggtcaatcgccctggcaagcgttctggcgcgtggcgctgcccatggcacggccggcgattggcgccggggtggccttggccttgatggagacgttggcagatttcggtgcggtctcggtgttcaacttcgacacctttaccaccgctatctacaagacctggtacggctttttcagcctgtcgagtgcggcgcagttggccagcttgttgttgctggtggtgatgctggtgctgtacggcgaacgacgcgcccggggagccagccggccgagcaacgagcgtccacggggcaaagcgctgtatcacttgcgtgggttcaaagcagcggcagccagtagttggtgtggcttggtgttcgcctgcgcctttgtcattccaatgttgcaactggtcgcgtggttctggcagcgcggtcgttttgactgggatgagcgttattcaggcctgatcgtccataccctctacctgggcggcattgcggcgctgatcacggtcagcgtggcgctgatattggcctttgccaatcgcttggccccgacccgggtaatccgctccggtatcagcctggccaatgtgggctacgcgctaccgggctcggtgttggcggtgtcgatcatgttggcgttcagctacttggaccgtgaactggtggtgcctctgtcgggctggctgggaggcgcgggcaagccactgttgctgggcagcttgtcggcgttggtgttggcctatctggtgcgttttctggcggtcgcctacgggccgttggaaaacagcctggcgcgaatccggccttcattaccggaagcggcacgcagcctcggggtgagcgggccgcgactgttttgcaaagtgtatctgccattattgttgcccggaacgctgagcgcggcgttgctggtgttcgttgatgtgctcaaggaaatgcccgcaaccctgctgatgcgcccgtttggctgggacaccctggcggtacgcatcttcgaaatgaccagcgagggtgaatgggcacgggcttcgttaccggcgctgaccctcgtgctggtcggcctgctgccggtgatcgggctgatccggcgctctgcacggcaaatcggttaggtgccagtcctacggcttgcggctacaatgcgcggcattcggtgcgcttcgtctttcggagcgggtcgctgggtgtggctgcaggccttgtaattcagggtgttcaggcacaaacagctgctccgcgcaccttcgccaagcccggaaggagaaacccatgggacagcgtacgcctctgtatgacctgcatctcgccctaggcgcgaaaatggtcgattttggcggttgggatatgcctttgcattacggctcgcaagtcgaagaacaccatcaggtgcgacgcgattgcggggtgttcgacgtatcccatatgaccgtgatcgatgtcacaggccttcaggccaaggaatggctccagcacttgctggccaatgatgtcgatcgtttgcacggctgcggccgtgcgctttacagcgccatgctcaacgagcagggcggcgtggtggacgacatgatcgtctaccgcacagaaagcggttaccggttggtggttaacgctgctacccgtgaccaggatatggcttggatgcaggcgcaactcggcagttacgcggcgcagctgcatgagcggcccgagttggccatgcttgccattcagggcccccacgcccggcaaaaaatcgccgaactggtcacgcaatcgcgcagcaccctgattcatcagctcaagcccttcgagggccaggccgacggcgactggtttatcgcccgcacgggttacaccggcgaagacggcctggaaatcgtgctgcctgccgatcaggcgccgggctttttcaacgacctggtgggtgccggtatttcacccatcggcctcggtgcccgcgataccttgcgtctcgaagccggcatgaacctctatggccaggacatccatcaggatgtttcgccgctcgcggccaatatggcctggagcattgcctgggagcccgcagagcgcaatttcatcggccgcaccgcgctggaggcggaaaaagccgcgggtgtgcagttcaaactggtcgggctggtactggaggaacgtggggttttacgcgctcaccaggtggttcgtatcgccaatgttggcgaaggggagatcaccagtggtagtttctctcctacgctgagcaaatccattgccctggcacgcgtaccgacggccaccgccgatcgggccgaagtggaaattcgcggcaagtggtacccggttcgagtggtcaaaccgaccttcgtacgccatggcaaaacgttgatctaacctatttccggcaggccaaaggccgctgacattttttcttgaggacacagactatgagcgatatccctgccgacctgcgttttgccgagagtcacgaatgggcccgtctggaagctgacggcaccgtgaccgtcggtatctccgaccatgcccaggaagccttgggtgatgtggtgtttgttgagttgactgaagtcggtaacgtgtttgctgctgccgatcaggcgggtgtggttgagtcggtgaaagctgcgtcggatatctattcgccgattgcaggcgaagtgatcgcggtgaacgaggccctgagcggcgagccggagctgttgaactccgacccttacggtgcatggatcttcaagctcaagccaagcaccccggctgatctggacaagctgctggatgctgcaggctacaaagccgccatcggcgagtaaacgcagatagctgaaacagcacaaaccaatgtgggagctggcaagccagctcccacagttgattggggtttactccggtttcagcactgcttttacggctgctaccgaccgctctacatccgcctctgtcatcgccgtgaacatcggcaaagacacgatcaaacgcccaactttctccgccaccgggaacatgccttccttgaacccttgcgccttatacaggctcagcaggtggatcggcgggtagtgatagccaatgcccacatcgtgggcttgcatctgctccatgaacgtggcgcgagccggcagaccatcctgacgctccggcagcaccagctggaacaggtgccagttgctgttttcgaagtccgccggtggtagctgcgcaccgtattgctcttcaaaatcactgccgaaacatttgaagtagtggcgtgccaggttctgacggtgtgcggtgatcttctcgatatgagcgaactggcccaaacctatggctgcggcgatatcggtcatgttgaacttgccgcccaacacatccacatccagcccgtcgaaaccggtgcgggtaacgccctgcaggcgatatttttcggccaggcgtgcttcttcggcgttgttcaacaccaagcaaccgccctcggacgatgtaatgttcttgttggcctggaagctgaacgacacgaagtcaccggtagcgccaatgcgctcgccatcccagctggagcccaaggcttgagcagcgtcttcgacgatgcgcaggttgtacttgttggccagtgcatagagcatcggcatatccagaggcaggcctgccaggtaaaccgggatgatcgccttggtgcgcggggtgatggcagcttccacctgggccaggtcgatattgcgggtgaccgggtcgatatcggcaaacaccggagtggcgcccacttccagaattacgttggctgtggcgacccaggaaatcggcgtggtgatgacttcatcgccaggcccgataccggcgatgcgcagtgcgatctccatggtgcaggtgccggagttgaaggtacgcaccggacggccaccaaaatactccgacaattgtgcttcaaatgcctgcaccttcggcccgctggtgatccagcccgagcgcaatacatcgccgaccgccgagatggtggcctcatcaatggtaggtttggaaaacggcagaaagggctgttggctcatgacgacgaaggcatccgtttcagataggcgatgagtgttaaatgtatcagtaccgcatggttgcacggttcgactgaatatagcctgtcatgcgtgaacgaatcgtcgtgttgcaggcaaaaaaatgccgctttatcagcggcactgtttgcggtgtgtcagaaggccaggcgtgcttcaaaaaacacgttctgctccttgagtttgcctttgagctgctcgtcacgggcgtttatccggttggcgaaagtgttatagccggtttcgactttgcccatgtccacatagcgccagccggtgcccagcgtgagtttctcgctgactttggcatccagccccaagccaacgctgtaggcgaagttgtattgggtattgccggcgaactggcgagcgggattgccctgataaccctcggcatcaattttcgctacgcccagcccggccatgccgtaaaacgacaaccaatcgttgatcgggatatttttgtaaccgttgagcatcaagcgctggctgtcgacttcaaggcgattgacgttggcattgaagggggcccagcgagagtcgaacgtcgagctgctgcgcgtggtgtattcaccctccaggcgccagccatcggtaaaggcgaaccccaaggcaaatgaacccgtgaaggttttgctgttatcgggagcctccacttggtgggtgacacgagggctagtcagcaaggcgctggacagattttggcgagcgctgttgagtttcgccgacccataccagccttctgcctgggcactggaaatgatgaaggccgagagaaacagcgtgtatgcaagcttttgcatgaggactgattcgctttatgaaaaaggaatctttagcttgtggcctggtacttggggtgctcgacaggacttatccgcaaacggctggataaagcgggaaattgatcaggcgaatgtcgacgagggttgtaggaaagtcgtaaaaaagccgctgtaaaagcggcttttcatgctgttgttattcagcaacagcatttttcgcgaggattgcgttagccaactccatgtccgtggcctgcaggccagggttatcggcgcggactttctgcatggcagcttccaggtaagggccgcgaatgccgccgtcgctggcaacaaagctgcccgcgtcgtcctgggcagcaactaccagcttatggtccttgaaggtcaggtacgtcgagccggtagtggcgcccgacgagatgacattgcgccagaagctgtcggccatggctgaaccgacaggtagggaaagcacagcgagggttgcgacagcatatttgagacgcatgatgggtgactccgggtgggttatctgtactttatgattgtagttaccccaatcgagttcaatcctgactaaacagtttcaacctgcaaaatcaccccgttttgcccaatcacgcggacttgagcgcctacagggctgtccgggccggtcgccatccacacgccatcgccgacttttatcttgccacggccatcgactatcgcctgatgcaccataaaggtgcgcccgatcaactctgagccacgcatgttcagcccgggttggtcgctgaccttcgcgctgctgcgctggcgcttccaccagtacaccgccgtcaggatcgacaacaccgcgaacagcagcagttgccattccagcccgagtggagggaccagaaacttgatcacaccgactgccgccgcggcgatccccatccatagcaggtagccaccggcgccaaatacctcaagaatcagcagcaccgtgcccagtgccagccagtcccagaacgacagatgctgcaggaattcccacatggcgactgcctcagcctttcttgctgtcgaaggtagccttgacgatctcaccgatcccgccgacggcgccaatcacctggctggcttccagcggcatcaggatgactttgctgttgttggccgacgccagcttgcccagggcatcaatgtatttttgtgcgacgaagtagttcaccgcctgcacgttacccgacgcaatagcctcggaaaccacctgagtggcgcgcgcttctgcttcagcttgacgctcacgggcttccgactcgaggaaagccgcctgacggctaccttcggcttcaagaatctgcgcctgcttcttgccttcggcggtcaggattgccgaagcccgcaggccttcggcttcaaggatctgcgcacgcttgatccgctcggccttcatctggccggacatggcggccatcaggtcggcgggcgggctgatgtccttgatctcgatacgggtgatcttgatgccccacggcgccgtggcttcgtccacggtcttcaacagtttttcattgatgccgtcgcgctggctcaacatggcatccagctccatggagcccagcacggtacgaatgttggtttgcaacaggttgcggatggcgtgttcgaggttgttcacctcataggccgcctgggccgtgttgaccacctggaaaaagcacacggcgtcgatctgcacggtcgcgttgtcggcggtgatcacttcctggggtggaatatccaggacgctttccatcacgttgatcttgcggccgatgcggtccatgaccggaatgatgatattgaggccgggcttgagggtgttggtgtagcggccgaaacgctcgacagtccactggtaaccctgcggcaccaccttgaagcccatgaacaggatggccacggccaagcccacgaaaagaagcagtacggttccgatctgcattgcgattccctatctgatgatgtcagtgaaacgacgttcggccgattgtaacggtccggtcaccgataagaacggtttcatggcccaacaatcaaaggatttgtttctgaatccccgggagtcatccgtaatacctctgtcagggtcgtcagcccggcgttcactttgtgcataccggccattctcaggctgcacatgccttggttcagcgcagcccggcgcaacggctggatgtctgcgccgggaacgatcagagccttgagcgcctcgtccatcaccatgatttcgtagagccctgcgcggcctcggtagccactgtcacgacattcaatgcagccggcggcttcgtacacgttcacgtgctcatccgttgcacgcttgcagtgggggcacaacaggcgcaccaagcgctgagccatcacccctatcagcgtagctttgatcaaataatgagcaatcccaagctcctgcaaacggctgatcgccccgggggcatcgtttgtatgcaaggtcgacagcaccaagtgcccggtcagcgcggcctggatcgccatttctgcagtttgctggtcgcggatctcgccgatcatgatgatgtccgggtcctggcgcagcaatgcgcggattccactggcgaaggtcaggtcgatgttgtgctgcacttgcatctggttgaacgcaggctcgaccatttcgatggggtcttcgactgtgcacaggttcacctcccgcgtcgccagttgcttgagcgtggtgtaaagggtgctggttttgccggagccggtagggccggtgacaagaacgatgccgttagcctgacgggtcatggcttgccagcgttgctggtcgtcgggtgacaaacccagctgttcgaaatccttgagcagcacctgcgggtcgaaaatccgcatcaccagtttctcgccaaacgccgtcggcagggttgagaggcgtagctccacttcggcgcccgcagggcttttggtctttacccggccgtcctggggtttgcgtttttccgccacgttcatgcggccgaggctctttaggcggctgaccactgccaacgtaacctgagacggaaactggtagacatcgtgcagcagcccgtcgatacgaaaacgcactcggccttgatcgcgacagggttcgatatggatatcgctggcccgttggtcgaaggcgtactgcagcaaccaatcaacgatgttgatgatgtgagcgtcatcggcatccggctccttgtcgccggagccgaggttgagcagatcggaatggccgggcgcggcacccttctggtcagcgccgctgactgacttggcgagccggtagaactcatcgatacagcgccgaatgtccagtgggttggcgacgacccgtttgatagagcgcttgagcacctgcgccaggcccgcctcccagcctgtgacgtagggctgcgcactggcgacggtgacggtctgtgaatccacggcgaccgccaggatggcgtggcgatgtgcgaacgcgtgggacatcaagggcacaaccgtcgccacgtcgatcttcaaggggtcgatccgcagataaggttgctccgcatgccgggcgagccattgagtcagcgtttccaggcaaacaccttcagccgcgatgcattccagaggatgtagagtggagggagccgccgataacctttgcgccaaatctgccggaatcagcccttgcgtgacgagcgtgggcagcaattgctgcaggttcaatggatgatctttcaaggcggcggacatgacttttttccgggaaaaaatagggcgtaaccccaagctagtcagcccttcagattcttcctcccggtgtgtattgcaggcttttaccgagaggccgccatcaccggctcaggccgcgcagaatcagccggccacaagtccagcgagcagacgctgatcaggtttcgaatcttttcaccgatcacttgggcgcgatgccagctcaggccggccatcacgatctcgatgctcagcaggtcatcgtcgcgtttcacattgacctgctgtggcgtcaaaaactgcaatgcgaaaaagttgagtacccggcacagcacgtccggctccgcttcggcgacgatccggtaatgcgcctggcaatgggtactggtgacggcccacgcatcgacgcgggtggcgggcaaggtggtttcgacggcgtgcatgcgggctctccagatttgactggagaaatttttacatctcccatgggagatttcttttctgaattgacgttaactggccggtaatttagataatcaattcaagataatcacttaaaaaggtaattctatgcacggcgagttggacacttatgatcgccgaatcctggccctgttgcaggaagacgcttcgctctccagcgcacagatcgccgagcaggttggcctgtcacagtcgccctgctggcgacgtatccagcggctcaaggaggagggtgtgatccgcgggcaggtcaccttgctggatcgcaaaaagatcggcctcaacacgcagattttcgccgaggtgaaactcaacgcccacgggcgttcgaacttcaccgagttcaccgacgcgattcgcggttttccggaagtgctggaatgttatgtgctgatgggcgcggtggactttctgctgcgtattgtgacttcggatatcgaggcgtacgagcgttttttctttgagaagttgtcgatggtgccggggattcaggaagtgaactcgattgtggccttgtcggagatcaagtccaccaccagcctgccggtgttgcgctgacagggatggcctcatcgcggcggtgcgacgattcgacaagcccggctcccacatttgactgcattccagagttggaactcggtcaaagtgggagcgggcttgtcgaatcgtcgcaccgccgcgatagcgtccttacaggcgcagcaaagtcttccacgcgcggttctggtacaccgcaatcgcttgatgcatccgcgcatccagcgactcatcggtgatcagttggttggccaattgcgccaacttgttcagctcgccgtacaaacggtccagctccgcaatgtccacgacgtggcgggcatggtgcagccaagcttgaatacgctcaatgcgcggcagttgctcagccagatcttccggctgttgctggtagcgcggcagttgcaaggcgacggcatcgtcggccagcaagcgtggcagccagttggtgatctgggcggcgccctggcggttgccgcgcacagtgcgctcggcggtccagctgcgggccaacaaccaacgcgaagcgttcagtgagaacaggccccaacgcacgtcgtccaattcttcgatgaactgctccggcgccgctttgcggatgtcttcatcgtcatcaccggcctgcaccagcgggcgccagtcttccagcagggcatccagagcgctgcgcagttcgctggtggattgacgcggtgcggcctggccgaggctgccgatcagggcgcgcagttcgccgaggttgtcgacccagtcctgcagcaggcgccagtggccattgaaccggtactgttcggccaggcgctggctgctgccgagcaggtgccacatgatcgcggcgaaggcgtcgtccagcggcatttcggcgtgaatctgcggcgccggcaggctcagcgagtagctgctggcgtcatacaggcggtagccgcgctcggccttgctgatatcgcacggcatcagtgccagggtcgcggccagttcggcagccagttccagcagggctgccggttcgccttcgcgcagttccagttccagttcgcagatttcttctttctgcttgccaaccaccacatggcccaggtccagcgcggcttcgatgaccactttggccttgccacggccccaggcgatttcggcgcgttcacgcacgaagtcggtggtgaaaatcggcttcagggtctttttgtccagttcggccagttgctcgggccagcattcgccgtcgagtttcttcacgtcgagcttggccttgggcaggtcccagttgtattcgttgcgttccgacaagccggcgacgctttggccgcgggtcttgagggtttggatgatgtcgtcaccgtccttgcgcaggcgcagggcaactttggcctgggccaggtcgcgctcgggggtgtcgaaatactggttcatcaactcacggcgttcccagccacttttgttgcgttttttcaggagcgggtgctcacgcagcgcggcgagggtctcgcggctgacgcgaagcttgatttcggtttctttttgcatggccggaacatccaggatcgggagcgcagccggggaaaagagtggctgccaaggtcgtgcagtgtacaggactgagcccggcaacgtgccgcaacggtttattgtgtcgtgcagatggctctatagtggggctcatccgggaagttgagagaccgcgcatgccgttaccgtccatgaaagagcagtttgccgcgctgattgccgcgccttcggtcagttgcacccaagcgtctctcgaccagaccaaccgcccggtgatcgatctgcttgccagttggctgggtgatttgggttttgccatcgacattcagcaagtcagccccggcaaattcaacttgctggcgagtttcggcagcggcccgggcgggctcgtgctggcgggccatagcgataccgttccgtatgacgccgcgttgtggaagaccgatccgctcaagttgacggaagtcgacggccgctgggtaggattgggcagctgtgacatgaaaggttttttcgccctggcgattgaggcggtattgccgctgctggatcaaccgttcaagcagcccttgctgattcttgccacttgcgatgaagaaagctcgatgtccggcgcacgtgccctcgccgaggcgggtcgcccattgggccgcgctgcggtgattggtgagccgaccggcctgaagccgattcgcctgcacaaaggcgtgatgatggagcgcatcgatattcttggccaaagcggccactcgtcggatcccagcctggggcacagtgccctcgaagccatgcacgacgccatcggcgagctgcgcggcctgcgcctggcctggcagcgcgaataccgcaacccgcaattcagcgtgccgcagccgaccatgaacttcggctgcatccatggcggcgataaccccaaccgtatctgcggccagtgctccctggagttcgacctgcgcccgctgccgggcatggaccctcaggtactgcgcgacgccattcgccagaagctcgagcccctggccgaacggcataaagtgaagattgattacgcgccgctgttccccgaagtgccgccgttcgaacagcccgaagacgccgagctggtgcgggttgcggaacgtttgaccggtcatcgtgccgaagcagtggcgtttggcaccgaagcgccttatcttcagcgccttggttgcgaaaccctggtattgggccctggcgacatcgcctgcgcccatcagccgggcgagtaccttgaaatgtcacgcttggcgcctacagtgcgtctattgcgtgaactgatcgagcactactgcctgaaacctgcataaattaacccctgcccattcgtacatagaaggagagcgagcgtgtcgccaagcctgttccgacgataaccatcagcccgttgtgcgctttcacgattcatcctttttcggctgctttttattacaggcccaggtgttatgcccgaatacgttaattggcttcgtcacgcttcgccctacatcaatgctcaccgggactgcacctttgtggtcatgctgcccggcgatggtgtggaacacccgaacttcggcaatatcgtccacgacctggtgctgctgcacagccttggtgtgcggctggtgctggttcacggttcgcgtccacagatcgaaacccgccttgaagcacgcggcctgaccccggcttaccatgaaggcttgcgcatcaccgatgccgcgacgctggagtgtgtgatcgatgcggttggccacttgcgtatcgccattgaagcgcgtctgtcgatggacatggcgtcctcaccgatgcagggctcgcgcctgcgcgtggccagcggcaacctggtgaccgcgcggccaatcggcgtgctcgaaggcgtggactatcaccacaccggcgaggtgcgccgcgttgaccgcaagggcatcaaccgcctgctcgacgagcgctccattgtattgctgtcgccgctgggctattcgccgaccggtgaaatcttcaaccttgcttgcgaagacgtcgcgacccgcgcggccattgacctgggtgccgacaaactgctgttgtttggtgccgacctcggcctgatcgatgagcacggtcgtctggtgcgcgaattgcgcccgcaacaagtgccagcgcacttgcagcgcttgggcagcaactaccaggcggaactgctcgatgccgccgccgaggcttgccgtggtggggtagggcgaagccatattgtgagctacgccgaagatggcgccttgctcaccgagctgttcacccgggacggcggcggtacgctggtggcccaggagcaattcgaactggtgcgcgaagcggcgattgaagacgtcggcggtttactcgacctgatcagcccgctggaagagcagggcattctggtgcggcgttcgcgagaggtgctggagcgtgagatcgagcaattcagcgtggtcgaacgtgaaggcatgatcatcgcctgtgcggcgttgtatcagatcgccgactcggatgcgggtgagctggcgtgcctggcagtgaacccggaataccgccacggcgggcgcggtgatgagttgctggagcgtatcgaaacgcgcgcgcgggcgcaggggttgaagacgttgtttgtgctcactacccgtacggcccactggttccgtgagcgcgggtttgtgccgagcagcgtggaccgcctaccgtcggcgcgggcgtcgctgtacaactatcagcgtaattcgaagattttcgagaaggcgctataggccttattttgaaaacgaagcaggtccaaatgtgggagcgagcttgctcgcgaaagcggagtgccagtcaatacatctttaactgacccaccgcattcgcgagcaagtcgaatcgtcgcaccgccgctcccacattggactgtgttcaatccttaatgaatctgtcggtcacgaaggccgaatagtccggcagcaccgtttcaaccttcccttgttccttcaagaacttcgccgtttccccaatcgccttcgccgtaccgcctttgagcagcgcctcggtttgctgtgccttggcgtcgggaaaagtagtgccggcgagtagtttaggaatgtccgccgcatttgaacctgtcaatttagcgattttctgcacgggctcagagtccacggtccagctgtctttatgggcggcatagtcggcgaaggagtcgagggtgaccttggcaaatctggccactacgtcaggatgtttttccgcaaaatccttgcgcgccacccacacctcaaaggtcggcgcgccccacagacccacctgggccgcgtctgtcagagtttttccggttttacggatctctccgagggccggcgaccacacaaatgcaccgtctatatcgccacgtttccacgcggcagcaatttcggcgggttgcaggttcaccactttgacttgtttggtgtccagcccccagtgtttgagcgcgccgagcaggctgtaatgagaggttgagacgaacggcgtggcgatggttttgcccaccaggtcctgcggtttgtcgatgccgctgccgttgcgcaccaccagggcttcagaagcattgatctgcgccgatacgataaacgccacgatgggaaggttgcgtgaagccgctgctgcaagggggctggagccaagattgccgatttgcacgtcgccggatgcgatggccgtgacaacttccggcccgctgttgaagcggcgccaggcgatcttttcgccaatggctttttcgtagaggccgtcggcctgggggactttgctggggtcgataccggtttggtagccgatggttaagtcggccgcttggacaccaaaagaaagtattagtgacacaaaaactgtaacaaattgacgggaggatgtgcgtttggccatgatggcgtcgcctttttgatcgtgggtgacgtatgcaacagtacggccacactaatcgatctaaaaaagcgctggtaaataccattttggcattagcttatggagcggctggtctacgctgacgggctcgttttataacaacccttatgcctgaatcgtatgaaaaagaatgaaaacattctttttgggtgtatgaaaaactcattaccctgcagggaccaaatcaactgcggttagacgaaggtagtagacacacaaagttacgattgacttggtagtcactatccggcgctaatcgcgcatctgtggatcgagggcgtcagacccgagaccttagaaatacaaaaattagaaatgagaggagcggtacatgaagaagtcaacattggcgttggctgtgaccctgggcgcaatcgctcagcaagcaggcgctgccggtttcatcgatgacagcaaagtaacactgggtctgcgtaacttttacatcaataccgacaaccgtgactcggccgctggcactccagccaacaagcgcgccggtgttcagagcaagaacgaagaatggggccaaggcttcgatctgcgcttcatctccggtttcacccaaggcactgtaggcttcggtcttgatgctatcggcctgttgggcgttcgcctggactccggtggcggcaccaacggcgctactgcttcttcctacggcggcaccgtgtttccgagcaagtccaatggcgaagccgttgataacttctcgagcctgggcctgacggctaaagccaagatctctcagaccgaactgaagctgggtacgctgatgcctaagctgccggttatcgtgtccaacgatggtcgcctgctgccgcaaaccttccagggtggccagatcacgtccaacgatatcaaggacttgacactggttgccggccagattgaaaaggccaagggccgtaactccagcaacgtcgacaacctgtcgatcgcgggtgccaacagccgtggcgtcaactggcgtgacagcaacaagttctacttcgccggtggtgactacaagatcaccaaggacctgactgcccagtactactacggcaacctggaagacttctacaagcagcacttcctgggtctgacccacaactgggctattggcccgggcgttctgaaatccgatctgcgttacttcaacagctctgatgacggtaaaaacagccacgagtctgcttactactcttcgggcaactacaacggtttcgcttcgggtcgtggcaaggtcgacaacaacctgtatagcggcctgttcctgtacaccgttgccggtcacacctttggtggtggttaccaggtcagcaatggcagcagtgacttcccttggttgaaccaaggcgacggttcgtctgcttacatcaccactgacatgcagatcgccaagtttgcccgcgctggcgaacgtacctggcaagctcgctacgcattcgacttcgccaaagttggcgttcctggtctgactgctggtgttgtgtacctcaagggcacaaacatcgacaccgtcaacgccgctcgtgccgagttcaccggtcagtccgagtgggaacgtgacatcaccgttgcttacgtgattccagaaggcccactgaaaaatcttggtgtcgcctggaaaaacgctatgtggcgcaacgatgttgcttccgcgcgcgatcaagacgaaaaccgtgtaatcgtcagctactcgtacgcattcaagtaactgcttaaagccttgcccggcgcaacgccgggcaaggtatgttgctttcaagtcgggctcaacccccgcaagcccttcctgaatcccctctttgtacagcgtctcaaggccttctcgaaccttggaatcaatggtgctcctcgcccgttgcggcgtccaatgaacagatttttaatattcccttgtcgtctaaataaatcgatatttattctttttaaataatccctaacccatgcacagtgggctccataagcacccatcaggagccacaccatgagcctaagactgggcgacatcgcccccgacttcgagcaggattccagcgccggcaagattcgtttccacgaatggctgggcgatagctggggcgtgttgttttcccatccggctgacttcaccccggtgtgcaccaccgagctgggcttcaccgccaagctcaaagatgaattcgccaagcgtggcgtcaaggccatcgccctgtcggtcgacccggtggactcgcaccacaagtggatcgaagacatcaacgaaacccagaacaccgtcgtcaacttcccgatcctggcggatgccgaccgcaaagtgtcggacctctacgacctgattcacccgaacgccagtgacaccctcaccgtgcgctccttgttcgtgatcgacccgaacaagaagatccgcctgaccatcacctacccggccagcactggtcgcaacttccacgaaatcctgcgggtcattgattcgctgcagctgaccgacaaccacaaagtcgccacccccgccaactggcaggacggtgatgaagtggtgatcgtgccgtcgctcaaggatgaggaggagatcaaaaagcgctttccgaaggggtatcgcgcggtgaagccgtacctgcgtcttaccccacaacctaaccgctgaagctgaaatcgctatcgcgggcaagcccggctcccacaggtgaccgcattcccctgtgggagccgggcttgcccgcgatagcggcggtacatgcaccacaagttccgaattgaaaccgaatcacatagcaggggttttcaggccgtttcgacggccttttttttcgcccgcagctttataaagctcatattcattttaagaataaacaaatgaaaaaatgagatttatagatatataaatatgctgatagggtctttccatcttggcgacatcgccacacagcgaaccgccgacacttgctcaaggaatacctgcatgctggtcgtaacacttggaggcagccccagccagcgttcccgctccggggtcttgctggataaaacccgtcagtggctgcagcaaaaaggcgtggaagtggtgagttatcagatacgggacttcccggccgaagacttgctgcacgcccgcttcgacagccccaaggtcatcgacctgctgcaacaagtggccaacgccgatggtttggtcatcgccacgccggtatacaaggcttctttttccggcgcactgaaaaccgtgctcgacctgctgcccgaacgcgccctggcccacaagatcgtcttgccgatggccaccggcggcagcatcgcccacatgctggcggtggactacgccttgaagcccgtgctgtcggccttgaaagcccaggaattgctccacggcatttttgccgaagacagccagatcgcttacggcgaaggcagtgcccaggcgcaactggtgccggtgctcgaacaccgtttgcacgaagccctggagaccttctacagcgccatggcccgacgcccaaaaccgcttgacccccatgtgttgaatgaacgtttgttgagtgctcgctggagcatttaagcctcaccggtttttgtagtactcaccttactcagccgccaacggccaagcaggtgcagccaaccccctcatcgcattatttggagagagcgccatgcgcactgtcatcttgcgtcgtggtctggtcgcactctttgctgcggctgtgtccttcggcgccattgttcaagcccaggccgctgagaccctgcggatcggctatcagaaatacggcaccctcgtgctgctcaaggccaagggctcgctggaaaagcgcctggccgcccaaggcgtgcaggtgcagtggactgaatttcccggcgggccacagttacttgaaggcctcaacgtcggctcgatcgactttggtgtgacgggcgaaaccccaccggtcttcgcccaggctgccggtgccgacctgctttacgtggcttacgaaccgcccgcgccgaccagtgaagcgatcctggtgccgaaagattccacgatcaaatccgtggccgagctcaagggcaagaaaatcgtcctgaacaaaggctccaacgtgcactacctgctggtccgtgcgctggaagatgccggcctgaaatacaccgacgtgcagaccgtgttccttccgcccgccgacgcccgtgccgccttcgagcgtggcagcgtggacgcctgggtgatctgggacccgtaccaggctgccgccgagaaacaactgcaagcgcgcaccctgcgtgacggtaccggcatcgccgacaaccaccagttctacttggccaccaagccttacgccacgcagcaccctgaagtgatcaaggcgctggtggaagaagtgcgcgcagtgggcgaatggtccaaggccaacccgcaggaagtgaccgaacaagtcgcaccgctgctcggcctgccggctgacatcaccctgacctcggtgaaacgccaaggctacggcgcgctgttcctgaccccggaagtggtcgccgcccaacagaaaatcgctgacagcttctaccaactcaaattgatccccaaacccttgaacatcaaggacgtgatctggacgccacccgccgccgttgccaaagcgccgtaatccgacttcttcaggagacaactccatgagcctcaatattttctggttcctgcctacccacggcgacggccattaccttggcaccgccgaaggcgctcgcgccgtcgaccacggttatttgcaacaagtcgcgcaagcggctgaccgcctgggtttcggtggcgtgctgatccccactggtcgctcctgcgaagactcgtggctggtcgccgcctcgctgatcccggtgacccagcgtctgaaattcctcgtcgcattgcgccccgggatcatttccccgacggtggctgcgcgtcaggccgcgaccctcgaccgcttgtccggtggccgcgcgctgttcaacttggtcaccggcggtgatccggatgaattggccggcgatggcttgttcctcacccacgaggagcgctatcaggcctccgtggaattcacccgcatctggcgccgcgtgctggaaggcgaaaccgtggattacgacggccagcacatcagcgtcaaaggcgccaaattgctctacccgccgatccagcagccgcgcccgccgctgtactttggcggttcctccgaagcggcccaggacctggcagccgaacaggtggaaatggtgctgacctggggcgagccgccagcagccgttgcggaaaaaatcgaacaggtgcgtgccaaggccgcaaaacttgggcgcaccgtgcgtttcggcatccgcctgcatgtgatcgtgcgtgaaaccaacgccgaagcctggcaggccgccgacaaactgatctcccacgtggacgatgaaaccatcgcccgtgctcaggcgtcgctgtcgcgctttgactcggtgggccagcaacgcatggccgcgttgcatggcggcagccgcgacaacctggaagtcagccccaacctttgggccggtgtcggcctggtgcgcggcggggccggtactgcgctggtgggtgatggcccaaccgttgcggcgcgggtcaatgaatacgcggcgctgggcatcgacacctttatcttctccggttatccacacctggaagagtcgtatcgggttgccgaactgttgttcccgcacctggatatcgaacgtcccgagctgcccaaaggcgccggctacgtcagcccgttcggcgaaatggtcgccaacgacatccttcccaaagctgcgtcacagagctgaggcgccgccatgaaccttgaaaaactgagccaccgtgtggcgccctgggtgctgccgattctattgctggcggtgtggcagttgtccgtgtcggcgggttggttgtcgacgcgcattctgccggcgcccagcgcggtgatcgaagccggggtcaacctggtgcgcaccggcgagatctggaaacacctggccatcagtggctggcgtgccgggctgggcttcgtaatcggcggcagtatcggcctgattctgggctttatcactggcctgtcgaagtggggcgagcgcctgctggacagctcggtgcagatgatccgcaacgtgccccatctggcgctgattccgctggtgatcctgtggttcggcatcgacgagaccgcgaagatttttctggtcgccctcggcacgctgttcccgatttacctgaacacctaccacggcatccgcaacgtcgacccggcgctggtggaaatgtcgcgcagttatggcttgtccgggttcagcctgttccgtcaggtgatcctgccgggcgcgctgccatcgattctggtcggcgtgcgctttgcgctgggctttatgtggctgacgctgatcgtggcggaaaccatctcggccagctccggtatcggctacctggcgatgaacgcccgtgagtttttgcaaaccgacgtggtggtattggccatcgtcatgtacgcgatcctcggcaaactcgccgacctggccgcgcgtggcctggagcgtgtgtggctgcgctggcacccggcttaccaagtgaacaaaggaggtgcggcatgaccgctcaacaacctccgcgcctgcttaaaggcatcccgctggcggtgcgcaagttgcgcaaggcctttggtgcgcgggaagtgctcaaagagattgatctgcatattccggcgggccagttcgtggccgtggtcggtcgcagtggttgcggcaaaagtactttgctgcgcctgctcgccggtctggataaagccagcggcggcgagctgctggccggctctgcaccgctgagcgaggcgattgaagacacgcggttgatgttccaggaagcgcgcttgctgccgtggaaaaagatcatcgacaacgtgggccttggccttaaaggcaactggcgccccaaggcgctggaggccctggaagcggtcggcctggccgagcgcgccaatgagtggccggcggccttgtccggtggccagaagcaacgcgtggccctggcgcgcgcattgattcaccagccacgcctgctgttgctcgacgagccgttgggcgcactggatgccctgacccgcatcgagatgcagcaactgatcgaaaacctctggcagaagcacggtttcaccgtgttgctggtcacccacgacgtcagcgaagccgtggcgattgccgaccgggtgatcctgatcgaagacggcgaaatcggcctggatctgatcgtcgacctgccgcgcccacgcgcccgcggctcgcatcgcctggctgcgctggaagctgaagtgctcaaccgtgtgctgtcgttacccggctcgccgccggaacccgaacctgtttcaccgctgcctacgcaattgcgttgggctcaataactcacttgtcccctgaaggaagaagaccatgactattaaagccatcaacgtgcgtaaccagttcaaaggcaccatcaaggaaatcgtcgaaggcgacgtgctgtcggaaatcgacgtgcagacggcgtccggcatcgtgacttcggtgatcactacccgttcggtcaaagagctggaactggtgattggcagtgaagtgattgcgttcgtgaagtcgactgaggtgtcgatcgccaagttgtgattgctgtcgaggccgccatcgcgggcaagcccgctcccacatgttgatgtgtgaatgcagtcaatgtgggagctggcttgcctgcgatgaggcccgtttgggcaaataggctggcaagtagagccccacatacgcatcaaacacccgcatgccttcctcagccatacgcgctgtgatctgcccgtgctggtgtatcgagcgcgcatatacgcggtcgctcagttccagcgccagggcaaacacatccacatcacttggcaacgtcggcacttcaaagtggcggctgaacaccgccaacatcaactcgcccaactccaagtcatgctgacggtccgcctgggttacttcggtcaggccatgttgcgccaggatcaactgccgcgcggccgcgtcgtgttcgtagatcgcgagcatgcgctgttcgacgatgcacgacaggtcacgccagtgcttgagtgagtcatggtcgatgggcgcctgaatcgccgcgcgaaacgctgcgtgcacatccgccgtcaacgcctccagcaacgccggtacgctggcgaaaaagtgatacaccgacgacggtggaatctgcgcacgttcggccacgctgtagatcgacaaactcgccacgccttcggcggccagcaaggtgcgggcagcgtcgaggatcgcgtcgatccgggcctggctgcgggcgcggggtttgcgaggggcggcggggcgggtggtcatggaagtctcctacaaggcagcgggcattgtatgagcaggaaggtgtgttgtctgccaggccgccatcgcgggcaagcccgctcccacatttttggtctgtggatgcagtcagatgtgggagctggcttgcctgcgatgaggccacttcggtctcccagaagaaacccataaaaaaacgccacagaccaaaagcctgtggcgttttttattgcagccgccgcttagacggtgtgcaggtaccagttgtactcaaggtcggagatggagtgttcaaactcttccagctcactttccttacaggcaacgaagatatcgatgtatttaggatcgatgtacttggccatcacctcgctgtcgtccaactcgcgcaatgcatcacgcaggttgttcggcaggctctgttcgttctgctcgtagctgttgccttccaccggtgcgccaggctcgatcttgttggtcaggccgtggtgcacgcctgccagtaccgaagccatcagcaggtaagggttggcgtcggcgccggctacgcggtgttcgatacgtacggcgtcggacgagccggtcggtacgcgaatcgccacggtgcggttgtccaggccccagcacggcgagttcggcacgtagaactgtgcgccaaaacgacggtaggagttgacgttggggcacaggaacgccatttgggcgggtagggtctccagcacaccgccgattgcgtgacgcaatgcggcgttctgctcgggatcctcgctggcaaagatgttcttgccttccttgtccaggatcgaaatgtgcacgtgcaaaccgttgcctgcctggcccgggtaaggcttggccatgaaggtggtgtccatctcatggtcgtaggcgatgttcttgatcaggcgcttgagcagtaccgcgtagtcgcacgccttgatcgggtcggccacgtggtgcaggttcacttcgaactgcgccggcgcactttccttgactatggcgtcggccgggatgccttgctctttggcaccttccagaatgtcctggaggcagtcgacgtattcgtcgaggtcgtcgatcaggtagacctgtgtcgagtgcgggcgtttgccggagatcggcgagcggggcggttgtgggcggccgttcacgttctcctggtcgatcaggtagaactcaagctcgaaggcggcgcagatggtcagaccgaggtcgtcaaatttgcttacaacttggcggagcacttcgcgaggatcggcgaagaaaggttcaccttccagttcgtgcatggtcatcagcagttgcgcggtagggcgcttttgccagggttcattgcacagggtatcggggatcggataacagattcggtcagcatcaccgatgtccagacccaggccggtgctttccaccgtcgagccgttgatatccagggcaaataaagaggcaggcaggttaatgcccttctcgtaaaccttgtggaggctggtgcgttcgatgcgcttgccgcgcaccacaccattcatatccgcaattagaaggtctacgtacagaacctcaggatgatccttaaggaacgcgttcgcttcgttaagctgaacggcacgcgggggtaccgacatgatgcaacacctttgttgttaaaaatatcaatcattgatcttttctggtttcagtcaacccgaacggcttgccgaagtcaagcgaggccttttttgccctaaaaaagcgccttgacgccttttttggggctttttggggcggttttttgggtttggacggcttgggactagcaggcttgagcgggccgtgttgtattttttacgggggtgttgtgtaaaaaaatgaacaaggctaagctcgattcaaacccataacagcaataataccggggtgcttcatgtctcgcctgccgttaatcggcgtcaccgcctgcaccaaacaggtcggtctgcatgcttatcacatcagtggcgacaaatacgtccgcgcagtggccaccgctgccaagggcctgccattgatcattccgtcccttggcgatctgctcgacccggccaatattcttgacggcctggacggcatcctgtttaccggctctccttccaatatcgaaccctttcactacgacggtccggccagcgcgcccgggactgctcatgattctgcacgcgaccagaccaccctgccgttgctgcgtgccgccattgcggcaggcgttccggtgctgggtatctgccgtggctttcaggaaatgaacgtggcgtttggcggcagcctgcaccagaaggttcatgaagtgccgggcatgatggatcaccgcgaagacgacacccagccgctggacgtccagtacggcccggcgcacgccgtggcgatctccccgaatggggtattggcaagcttggggttgccgcagacgattcaggtcaactcgatccacggccagggcgttgaccgccttgcaccggctttgcaggtcgaggcgacggctaccgatgggttgatcgaagctttttcttacacgtcgggcaaggcttttgctttaggagtgcaatggcaccccgaatggcaggtaagctctaacccgcactacctcgcgatcttccaggcctttggcacggcttgtcgaaagcgggcgatgcaacgcgacgcggatgctgcgtcaacttacgcctgacctttaatggatgtcaggaaacacagcccagaggcatttatgagtaacaacctcgaccagctcaccgattggttgaaagaccacaagatcacagaagtcgaatgcatgattggcgacctaacgggcatcacccggggcaagatctcgccgaccaacaagttcatcgccgaaaaaggcatgcgcctgcccgagagcgttctgttgcagaccgtgaccggcgactatgtcgaagacgacatctattacgaactgctcgacccggccgacatcgacatgatctgccgccccgaccagaatgccgtgtacctggtgccctgggccatcgagccgaccgcccaggtgatccatgacacctacgacaagcaaggcaacccgatcgagctgtcgccgcgcaacgtgctcaagaaagtcctcaagctctacgccgacagaggctggcagccgatcgtggcgccggagatggagttctacctgaccaagcgctgcgaagacccggacttcccgctgcaaccgccgatcggccgttccgggcgcccggagaccggtcgccagtccttctctatagaagcggccaacgaattcgacccgctgttcgaagacgtctacgactggtgcgagctgcaggagctggacctcgacacgctgatccacgaggacggcaccgcgcagatggaaatcaacttccgtcacggtgacgccctgtccctggccgaccagattctggtgttcaagcgcaccatgcgtgaggccgcgctcaagcacaacgtggccgccaccttcatggccaagccgatgaccggcgagcctggcagcgcgatgcacctgcaccagagcatcatcgacatcgccaccggaaagaacgtcttctccaatgaagacggaaccatgagccagctgttccttaatcacattggcggcctgcagaaattcatccctgaattgctgccgttgtttgcccccaacgtgaactcgttccgccgcttcctgccggacacctcggcgccggtgaacgtggaatggggcgaagaaaaccgcaccgtcggcctgcgcgtaccggatgccggcccgcagaaccgtcgcgtggaaaaccgcctgccgggcgccgacgccaacccgtacctggcgattgccgccagcctactgtgcggctacatcggcatggtcgaaggccataacccgagcgcgccggtggtcggccgtggctacgagcgccgtaacctgcgcctgccgttgaccatcgaagacgccctggagcgcatggaaaacagcaagaccatcgagaagtacctgggtcagaaattcatcaccggctacgtcgcggtcaagcgggccgagcatgaaaacttcaagcgtgtgatcagttcgtgggagcgggaattcctgcttttcgccgtctgatgcgccgggcgcgccgaggaaaaggcgcgccctcacctgaaacatctaggagattggtatgtccagcaacaacccgcaaacccgtgaatggcaagccttgagcagcgatcatcacttggcgccgttcagcgatttcaagcaattgaaagagaagggcccacggatcatcaccaaagcccacggcgtttacctgtgggacagcgaaggcaacaagatcctcgatggcatggctggcctgtggtgcgtggcgatcggttacggtcgcgacgaactggctgatgccgccgccaagcagatgaaagaactgccgtactacaacctgttcttccagaccgcacacccgccggtgctggagttggcaaaagtgatttccgacgtggcgccagcgggcatgaaccacgtgttcttcaccggttccggctccgaaggcaacgacaccatgctgcgtatggtccgccactattgggcgatcaagggccagccaaacaagaaaaccatcatcagccgcaagaatggctaccacggctccaccgtggcgggcgccagtctcggcggcatgacctatatgcatgaacagggcgacttgccgatcccgggcatcacccacatcgcccagccgtactggtatggcgaaggcggcgacatgagcccggaagagttcggggtctgggccgccaaccagctggaagagaaaattctggaagtcggcgtggacaacgtcggtgccttcattgccgagccgatccagggtgccggtggcgtgatcgtgccgccagacacctactggccgcgcatcaaggaaatccttgccaagtacgacattctgtttgtcgccgacgaagtgatctgcggtttcggccgcaccggtgagtggttcggcagcgacttctatggcctcaagccgcacatgatgaccatcgccaagggcctgacttccggctacatcccgatgggtggcctgatcgtgcacgacgacgtggtggccgtgctcaatgaaggcggtgatttcaaccacggcttcacctattccgggcacccggtggcggcggcggtggcgctggaaaacatccgcatcatgcgcgatgaaaaaatcatcagccgggttcacgaagaaacggcaccgtatttgcagaaacgtctgagggaactggctgatcacccgttggtgggtgaagttcgcggtgtgggcatgctgggggcgattgagctggtgcaggacaaggccacgcgcaaacgctacgaaggcaaaggtgttggcatgatctgccgcacgttctgcttcgagaacggcctgatcatgcgcgccgtgggcgacaccatgatcatttcgccgtcgctggtgatcagcaaagctgaaatcgacgagctggtgaccaaggctcgccactgcctggacctgactttggcggcattgcagggctaagtgctaggctcagtgcgcagcggctttcgggtgctgcgtgccgggcagttttaaatgaggctttggttgaaagccggcctctgaacttgccagactgtcgccctgttttgttgcccttagacgggccgcttaacgatgaagaacgtggcccaaaaaagaaaaattggagcatcaccaaatgaaggcattaggtttgaagaacgctggcaagaccctcctcgccttgtccctgatgggcgcaatggcgggcgcggcccaggcagacgataaagtgctgcacgtctacaactggtccgactacattgcaccggacaccatcgccaactttgaaaaagagtcgggcatcaaagtggtgtacgacgttttcgacagcaacgaaaccctggaagccaaattgctggcaggcaagtccggttacgacatcgtcgtaccgtcgaacaacttcctcgccaagcagatcaaggccggcgtttaccaggagctggacaagtccaagctgtccaactacgacaacctgaacaaatccttgcttaaagccgtgtcggtcagcgacccggacaacaagcacgccttcccgtacatgtggggctcgatcggcatcggctacaacccggagaaggtcaaggccgcactgggcatcgacaagatcgaatcctgggacaccatcttgaagccggaaaacctcgccaagctgaaaagctgcggcgtgagcttcctcgactcgcctaccgaaatgctgccggtagcgctgcattacctgggcctgccgaccgacacccagaagaaagccgacctgaagcaggccgaagacctgttcctcaagctgcgcccttcgatcggctacttccactcgtccaagtacatctccgacctggccaacggcaacatctgcgtggccgtgggttactcgggtgacgtgcaacaagccaagtcccgcgcggctgaagccggtggcaaagtcaaagtggcttacgacattccgaaagaaggcgccggcagcttctacgacatggtcgccatccctaaagatgccgaaaacgtcgacgcggcttacaagttcatgaactacctgctcaagccggaagtcatggccggtattaccaacagcgtgcgtttcccgaacggtaacgagaaagccactgcactggtcgacaaagacatcaccagcgacccgggcatctacccgccggctgacgtgcaagccaagctctacgcgattgccgacttgccggctgcaacccagcgtgaaatgacacgcagctggaccaaaatcaaatcgggcaagtaagccttaaaacagtaggaggggcaggttgactgcccttcttacacattaaatgacagaaagttttgccggatcggtttatcgagggtaagttgcgcgccggttttgttgccgggcaacaacttaaggcccaactagttaagaggacctccacttgccaatttcttttttccgccaagccatgctggtgggtgctggtatcacgctggcgttgagcgtgcaggctgcgccgactgtgcatatttataactggtcggactacattggcccggacaccctggccaacttcgaaaaggccaccggcatcaagcctgtgtatgacgtgtttgattccaacgaaaccctggaaggcaagttgctggccgggcgtaccggttatgacgtggtcgtgccgtccaaccacttcctcggcaagcagatcaaggccggggcgttccagaaactcgacaggtctttactgaccaactattccaaccttgacccggtgctgctcaagcgcctggaaaagaacgatccgggtaaccaatacgccgtgccgtacctgtggggcaccaatggcattggttacaacgtcgataaagtgaaggaagtgctgggcgtcgaccatatcgactcctgggccgtgctgttcgagccggagaacatgaagaagctggccagttgcggcgtgtcgttcatggactcggcggatgaaatgctgccggcggtgctcaactacatgggcctgaaccccaacagcaccaaccctgaggattacaagaaggccgaagagaagctgctcaaagtgcggccctacgtgacctacttccattcgtccaaatacatctcggacctggccaacggcaacatctgcgtggcggcaggtttctccggcgatgtgttccaggccaaggctcgcgcaagcgaggcgggtaaaggcgtgaacatcgcctacacgattccgaaagaaggcggcaacctgtggtttgacgtgctggcgatcccggcggatgccgcgaacgtcaaagaggcccacgccttcatcaactatttgctgaagcctgaggtgatcgctcaggtcagtgatcaagtcggttacgccaaccctaacccaggggcggacaaactgatggagcaatcgatacgcaccgacgcagcggtttacccaccgcaggcggttctcgaccggacattcgtcaacttcgagttacccccgaaagtgcaacgtttaatgacccgtagctggaccaaggtcaagacgggcaagtaaggctcaacttatccagggttcgcccgtttggggcgaactgtactgtttttttctgggagtttcgtaaatggcagttgcctccggcgcctataagaaagccctcgagggcgaccagacaccgaaaaaggtgttggtcaaaatcgaccgggtcacgaagaagttcgacgagacgattgccgtggacgacgtgtccctggaaatcaagaaaggcgagattttcgccttgctcggcggatcgggttcgggcaaatccaccttgctgcgcatgctcgcaggcttcgagcgcccgaccgagggccgcatctacctcgacggcgaagacatcaccgacatgccgccctacgagcggccgatcaacatgatgttccagtcctatgccttgtttccgcacatgaccgtggcgcagaacatcgccttcggcctgcaacaggacaagatccccaaggccgagatcgatgcccgcgtggccgaaatgctcaagctggtgcagatgagccagtacgccaagcgcaagccgcaccagttgtccggcggccagcgtcagcgtgtggccctcgcccgttccctggctaaacgcccgaaactgctgctgctcgatgagccgatgggcgcactcgacaaaaagctgcgttcgcaaatgcagctagaacttgtcgagatcatcgagcgcgtcggcgtgacctgcgtgatggtaacccacgaccaggaagaggccatgaccatggccgagcgcatcgcgatcatgcacctgggctggatcgcccagatcggcagcccgatcgacatttacgaaacgcccaccagccgcctggtgtgcgagttcatcggcaacgtcaacatcttcgatacccaggtggtagacgatgccgaaggccatgccgtgctcaagtgcgccgacctggaccgcgacatctacgtgggctacggcatcgccacgtcggtggaagacaagtcggtgacctacgcgatccgcccggaaaaactgctggtcaccaccgaaatgccgacctgcgagcacaactggtccagcggcaaggtgcacgacatcgcctacctcggcgggcattcggtgttctacgtggaactgccgagcggcaagctggtgcagtccttcgtcgccaacgccgaacgccgtggccagcggccaacctggggtgaccaggtttacgtgtggtgggaagacgacagcggcgtggtacttcgctcatgaacatgaagaagctcaaacgtcgcctgcaacgaataacgcccggtggccggcatgtggtcatcgggatcccgtttctctggctgttcctgttttttgccctgccgtttttcatcgtattgaaaatcagctttgccgaagccgacgtggcgatcccgccgtacaccgagatctacaccttcgttgagcagaagctgcaactggtgctgaacctgggcaactacgcgatgctcggtgacgatgagctctacatcgccgcgtacctgggctcgctgaagatggcgtttttcagcacgctgctgtgcctgctgatcggctacccgatggcctacgccatcgccagcgcacgcaaagagatgcagaccgtgctggtgctgctgatcatgatgccgacctggaccgcgatcctgatccgcgtgtatgcgtggatgggcattctcagcaacaacgggttgctcaatggcttcctgatgtccatggggctgatcaacgaaccgctgcagatcctcaacaccaacatcgcggtgtacatcggcgtggtctattcgtacctgccgttcatgatcctgccgctgtacgccaacctggtcaaacacgaccaaagcctgctggaagctgcatcggacctggggtcgagcaccttcaacagcttctggaaaatcaccgtgccgctgtccaagaacggcatcatcgccggctgcatgctggtgtttatcccggtggtgggcgagttcgtgattcccgaactgctcggcggcccggaaaccctgatgatcggtaaagtgttgtggcaagaattcttcaacaaccgtgactggcctgtggcgtctgccctggcagtggtgatgctggcgatcctgatcgtgccgatcatcctgttcaaccgcagccaagccaaagagatggagggcaagatatgaagcgtttcagtttctcaagcttcatgctggtagcgggcttgttgttcatctacctgccgatgctgatcctggtgatctactcgttcaacgaatccaaactggtgacggtgtggggcggttggtcggtgaagtggtacgtgggcctgttggacaacacccagttgatgggctcggtggcgcgttccctggaaattgcctgctacaccgccgttgcggccgtggcgctgggcaccctggcagccttcgtgctgacgcgcatcagccacttcaagggccgcacgctgttcggtggcctggtgacggcgccgttggtcatgcccgaagtgatcaccggtctgtcgctgttgctgctgtttgtagccatggcgcagatgatcggctggccgcaggaacgcggcatcgtgaccatctggatcgcccacaccaccttctgtgcggcgtatgtggcagtggtggtgtcggcgcgcttgcgtgagctggacctgtcgattgaagaagcggcgatggacctgggcgcgcggccgtggaaggtgttcttcctgatcaccatcccgatgatcgcgccatcgttggcggcgggcggcatgatgtcgttcgcgctgtccctcgatgacctggtactagccagcttcgtgtcgggcccgggttcaaccactttgccgatggaagtgttctcggccgtgcgccttggggttaaacccgagatcaacgccgtggccagtttgattctgttggcggtgtcgttggtgaccttcctggtgtggttcttcagccgtcgtgccgaagagatgcgcaagaaggcgatccagcaagccatcgaagaagcggccgcggatggctggcaacagcccgacaagcgccgcgcgcctgcgccggtctaactggcgcaacgcggttaaaaatgtgggagctggcttgcctgcgatagcggtgtatcagtaaaggaattattgactgatacaccgctatcgcaggcaagccagctcccacagttgattgcatttcaagtcaactatgcggaccagggcgacttgcggatcacctccacaaaattcatcggcttgaaccctggctcctgatccaccagcacatccgtcttcacgttgccaaacgtggtctgtgggcggtggcgcaagccgtcggcaaacgcgcagatgatgcactccttgaacccttcaccgcgtgggtgcgcatgcaccacggcttcgcgctgcacggtggaaaacgccgcgtagtccatgcccaaaacatccatttccacacccgcggtgaccaaggccacggtggggcgcaaatgctgcggcacgcccggcgtggtgtgcagggcgatggacagccacacttgctcgatatcgtcatcgctcagcccgtaaggcttgaggaaggccgcggctgcgttggcgccgtcgacttcaaagcgctcgtcgtcactgcgatggccttccaccaggcccaggtcatggaacattgcgccgacgtagagcagctccgggttgtaggccagttgcttgcgctcgccgctcaacgcgccgaacaggaaaacacggcgggagtggtggtacagcaggtcggattcgacgtcacgaatgtattcagtggtggccttggccagggcgctgtccgggatctggatgccggcgatggtggtgctcatggtcgttctcctcaacaaagcgccgggggtggcgccgatgagtccagtctggtcgcgtgcccgcgaaggggccatcggcacgagggcgcgatgtcggccaacctgccttcatatcgcgccaaaggtatacacggtcaaatgtgggagctggcttgcctgcgatagcatcaactcggtatacctgatacaccgaggtgcctgtatcgcaggcaagccagctcccacagggtttcgtgtccgccagtcataaggtttcgccatgcatagaaccgtcgccatcctgatcttccccggcgtccagtcactggacgtgaccggccccatggatgtgttctgcgaggccaaccgctttttgccgccgcaggatcactacacactggaagtcatcggcttcggccacggcagcatggccgcctccaacggtttgtcattgcaggcccaccggcattaccgcgaagccctgcaagcctacgacctgctgctggttgccggcggcccgcaattgcccttcgaggatttcggtgccgagttcgatgactggctgcgcgccgccactcaaagagcacagcgcttcggctccatctgcaacggcgccttcatgctcgcgcgcgccgggttgctggacggcaaaaccgtcaccactcactggaacgacgctgctgacctggcgcgcctgtgccccacggcccaggtcgaagccgaccgcctttacgtgcaggacggcaacctctacacctcggccggggtcacggcgggcatcgacttgtcgctgtatttgctggcccaggaccacgggccggaagtcgcgctgagcgtggccaagcgcttggtggtgttcacccagcgttcgggcgggcagtcgcagttcagcccgtttcttacgccccacgccgaaaccacctcggcggtggcgttggtgcaactctatgtgctggcgaacctgaccggcgatctgaccattgccgacctggccaaggcggctaatatgagcgcgcgcaatttctcccgcgtgttcgcccgcgaagcacggataaccccggccgagttcgtcgagcgggcgagggtggatgcggcacgggtgatgctcgaaagcagccccgcaccgctcaagaccgtggcctatcaatgcggctttcgcgacgcccagcacatgcgcggtgtgttcaaccgccggctgggcgtcacgccgcaacagttccggcttaactttgcggcgccggtttgagcgtgtcgtaggcttccagcgcgcgcagcgagtagatgtacgcagcgccggcattcagcgagatcgcggtggccagggtcgcggcgacttcttcgcgggtggcgccggccttgatcgccgcgtcggcatgcacgccgatgcaaccgtcgcaacgggtggtgatggccacggcgatggaaatcagttcacgggtcttggcatccaggacgttgttttcctcggcagcttcgcccagcgccatgtaggctttgaccatcttcgggttgctcttgcccagcgtgccaaaggctttcttcacggtaggcagcaagtcggaccagttattgaacattgcggtaactcctgaacaggttgggtgtgaagccagtctcttccgttcgaggttggcggtattgttcaatccgctcatctttttgaccgatgctcgcaaatgaattcgatcgacacccttatcgcgctggccaacctgcgcggcagtctggatctacgttgccagttccagggcgactgggcccttgatcatgcccccgagaacctcggcgtggcgccgtatcacatcgtgctcagcggcacctgccgcgccgaactcacgggcgggcagcacgtgacgctggaggagggcgacattctgctgatgcccggcggcgccactcatctgctgcgcagtcagggcgcgcgcatccggccgatgcagccgaaggtgatcgaaggcggcttgctcccggtgcatcgcctgggtggcgaccagccggaactggacatgctctgcggcagctttcactacaaccgccagtcgttgctgttcggtgcgttgccggaatttctggtggtgtccagccgccagtggcaggccgatgggcagttggcagcgctgatcgcgttgctgcgcagcgaagcggatggccaacagctgggcgcacgaacctttatcgatgcactgtcgtcagcgctgttcaccctgattctgcgggcctggttgagccgccaggcgccagtggcgggcaccttcgcattgctcgccgacaagcgcctgagcaaagcctggcaggcgatgctggccgagccggggcatgaatggaccatcgacacgctggctggcgccgcgagcatgtcacgggcgacctttatgcgggcgtttgtgaaggtggcgggggtgtcgccgtgggtgttgctgacccagttgcgcatggagctggcgtttaacctgctgcgccactcgcggttgagcctgctggatatcgccgcacaggtgggttaccagtcccaggcggcgttcagcaagaagttcaaggagacctatggcgaggcgccggggcggattcgggcacagtagtagccacgcagaggatcaaaaatgtgggagctggcttgcctgcgatagcgatgtgactgaaccactgctatcgcaggcaagccagctcccacattaatcgggtttacagtcggttatcgggctggcagtaatttcagtgttccgcgcgtattcgccgtcacttcctcatcactgaaatgcgcctgctcatagccgccctcaatgtaggtttccgcttgatccccatagtgcgaatcaaacggcacaccgctttgccccaccgggttgatggtcagggcgtgggccgggtcggcgaagtcgatcaggcggcgtgttgatgggccataggtcaccggccagggcgcggggccaatcgcggcggattggttgttcggcacttcgtggctgccgggggcggggaaggggccgacgttgaagatcacgtccaacggcttttgcatgcccagcgggtggccgtgggtcagggtgtgggccttgccccactgccattggctcgggtcatcgccgaaggtggtcttgaggtgggccaggctgttgtcccaggcgagcttcacggtttcggcgcgcttgccgtcccaccagggtgaatccggcgaggcggccaggcgcggcagcgcggcgtcgatcacgcgggtgccgagcagggttttgaacatattgtcgccgagcttggggtggaaggccgcgtcggtgaggttgaacaggaactggttgaacagcgtggcggctgtggaatccagcggatagtcgcctttccacgccgccaactgatcgaccagcttcaactgcgccggatccttgaccacttcacgcaacaccggcagcaacggcgcgagcaagcgtgggccataggcggtggtggtgcccagctgcaaggcctggctgttgttcacgtcccatttcacgcttttgtcgctcaactgcgcattcagctgctggccacggtcggcgaggttgtaatagccgggaatctccatgccggtgggcgacaccggctgggcattggcggacaccacgtagccccgcgccgggttttcttcctgggggttggcgctgaaagggtagaaacccagcttgtcggcttggacggtgctgccgtcgaggataaaccccggattgaccccggccgggcggatcggcaactgcgccgctgcccaccagccgatatcgcccttggcatttgcccacacgatgttcaaccccggcgccgagaccttggccgctgccgcgcgggccttggccagggtgtcggcgcggttgagctggtagaacccttcgagaatcgggttttgcgtgtcgagaaatgcccaccacatggcaatcggcgtcttgccggcgttttcgccgagcacgtcattgatgatcgggccgtggggcgactggcgcagggtgagcgtcaccggcgcctggcccttcaccgcaatctgttgctcgctgagggtcatgtccacccattgatcgtggtaccagacttggttgggattgtccgggttgaccttttcggcgatcaggtcgaggtcgtcgttctggaacatggtcaggctccagccgaaatccaggttgtgccccaggaacgccacgggcaccagcgcgttgtgatagccatacagctcaaagcctggcgctgacagctgcgcctcgtaccacaccgacggcaccgagaaacggatatgcgggtcacccgccagtaacggcttgccgctcttggtgcggctgccgctgatggcccaggcgttgctgccttcgaactgcggcaagccgttgtcggccagggcttgatcgctcaggacggcgagggcgccgaggctgttccagtcgctggcggccaggttcagcgcgcctttgggttgccagtcgagatcgaagactttcaggtaatcgccacccaactggtcgcggatgtaggtcagcaagggttccgtgcgaaacgcggcggcaaagctgtaggccaggtaaccggcgacgctgatggtgtcttcggcggtaaagcggcgcttgggaatgcccagcacgtcgaattccatcgggctggcgtggctgtcctgatactggttgatcccgtccaggtaggcttgcagcgtcttccacgccggcgagtcgtggtccatgtgttccacgtaactcaaggcgcgctcgcgaatacgcaggctgcgaaacagcttgtcggtctccagcaccttgggccccagcacttcggcgagttcgccccgggccaggcggcgcatgatctccatctggaacagccgatcctgggcgtgcacgtagccgagtgcgcggtacaggtcggtctcgttctcggcgcggatgtgcggcacgccacggtcgtcataacgcaccgtgaccgcaccttgcaggccagccagggtttcagtgccctggcgggtcggttgcttgctgtagacataccagccggcaccggccatcaaggcggcaatcagcagggcgagcacggtcaggctgcgtttcatggacggtccttgagtcagtcaccttgaaggtcaacggagtctaatgggtttggcgaaggctcggggaattgctgctgtgacagccgaggttcaagtggagaacaccccgaagcggctattattccacctgtcatctttgagctttttgccatgacctgcgcccagcaacccccttcagacgccaaccgccccgagcccgcctatgcgtgctgcctggaagcgccgtcgctgatcggccgctttttgcagcacccgccggtgggttttgatgcgcggctgtccgaacagggcctgccgtatttctttacgccgttcgatttgctgaccaccgccgacgatgaattcatcgcgcgggtgcgcggctggccggggtatggcctgtggagtgcgtggctgcgtatcgacagctgtttcgtcggcaccacggtcagcgaatacgcgccgttcccccaggccgtgtcgccccaggacctcgcgcagtggctgcaagaggtgtgcgcgccgcagcgcaagctcaccgtgatcaaggacgtgccgtgcgactcgccgctgctcagcgatgcggacaaccgctacgcccgaaccttgatcgaagagtgcagccggcgcggctttatcagcctggaaggtcaggcgctggcgtatgtgccgatcgacttcaccacgattgatgaatacttggcgcgcttgtcccacagccgccgtcgcaatatccggcgcaaattgcgcagccgcgaggccatgcgcgtggaaatcctcgacaccggcgacgcgcgcttcaacgatgccgcgtggctggcgcagttgtatgggctctacaaggcggtgtacgaccagagcgaaatccacttcgacctgctgactccggcgtttttcagcggcttgcttcaggacgccgccagcaacggccgcgtgttctgttactggcactgtgacgaactgatcggtttcaacctgtgctacgtgcagggtgacaagctgctcgacaagtacatcggcctgaattacccgctggcgctggagttcaacctctacttcgtcagttggtttgtgaaccttgagtacgcagtggccaacggcctgaagttttacgtggcaggctggaccgacccgcaggtcaaggccagcctgggcgccgacttcacctttacgcggcacctggtgtggatccgcaacccgttgctgcgcaagctgggcaaccgttttcgccaccactttgaaagcgacaaccagtggcaccaggagcaaaccgcatgagcttgacccgcacgcccctgatcctggatttcgacggcgccgtggcggacatccccggcgcggtcaccttgcccctgcaagcctggcaggaaaaaatccgcttcggctgccgctgggcgcagttcaaagaactggaaacggccctgcatacgcagatgcccagcgattacggctgcgtgttcaccggcagcggcgactaccaccacctcagccaactgttgctgaaccgcctgcctgcgcaacagaaataccaactgatcatttgcgacaaccaccctgacaacatgcgttaccccttcggcattcactgcggttcgtgggtttactgggccagccggttgccgcaggtcgagcatgtgcatgtgttgggcatcggctcccaggacattggcctgggccacgcctgggagaatcactggtcgccgttgctcaagggcaagctgacctactggaacgtcaacgtcgatacgcgctggatgaactgggtcggcgccgggcgcggcaaccgtgctttcagcaaccccgatgagttgatgcgcgcgttcctggcgcagtttgatcgctcgttgccggtttacctgtccatcgacaaagacgtgctgagccaggaggtggtgaacaccaactgggaccagggcgagttcctggagcagcatttgaatgacttgatcagcgcctgcgagggccagatcatcggcgcggacatcaccggtgatgtgtcggcctacagctatgaaagcaagttcaagcgctggctgagtgcgtccgatggccaggaggaattgccggcggcgcaagtgcagatctggcaagcgcagcagaacgcactgaacagccgcttggtgactcgcatcaatcagggctggcgacaatcgccttgagccggctgaggatctgttcgaagtggtcgtcggtgagccaatggctgttgctgatcgacagcgtgcggcgggcgaaggcctcggcttgggcgatttggccgccgggctgtaacagcggggccacggccgggtagccgggcaaggtgtggataaacaggcgcgtcacgccgagccccgaggtccacagctgcgccatcgccgcatcgcgggtgcgcgctgacggcatcaccaccatcagaaagggccaggtgccttgctgccccgggcggtccatgaccaccgagacgccgggcaaggcattcaagcgtgctgcgcggtgcagggcgcgatggcggccttgctgcaagtagccaggcaaacgcaccagcgcggcggtgccgaccttgcgccgataaccgcctaggcgatgcagagggatgtcgtcgaccgagaagtcatcgcccacagcggccacttcatcaccctgtgccagcgcggcgcgcaggcctttgccgtacgcgtagtacaaaccacgcggctgataaaccagcgcatacccccacagttcggcgctgcgttgcagttcccagcgcaggttgaagggcaggtcgttgcggcattggcggtgcaaagcctggtgcagcacggggtcgcggctgaacagcacgccgccctctgcggtcgtcaggcctttgcccagcgccatgctgaaaaagcccacgtcgcctttgagtccgacagattggccatcgtccagcgcgcccatggcttgggcggcgtcttcgatgaccgcagcaccgacgcggctggcaatacgtttggcggcgtctacatcggccacgcgcccggccaaatgggtgaccaccaccgccagcgtgctttcgtcgcacaactgcgtcagctgcgcttcgtccaggtcgatgctgcccggctgcaaatcacagggcaccacttgcagtggcgggcagtggtgggcggccaacgccaccaaggggcaggtataggcgggcacgataagccgggtgcggccgggcatgcgccgctgcaacacgcgcagggcgatgatcagcgcggctgtgccggagcagggcagtgcgggcagtggaatcgagagttggcgagccagcgcgggcgccagctcgcccgagaggccgagcaaatcccgccaacgcagaggcagccctgcggtgggcggaatttcccggggcatcattacgcgagcgcgtccgaacgctcggtgtcgacggccttttcggcttcgtcttcactgcgcgccaggcacagaatgcccgcgataatcagcgcgccgccgatgattttgggccaggtcaggctgtcatcgaacagccagacggaaatcagcgtgacgctgatcaactccaggtgcgaagccgcaaacgccgggcccacaggcgcgtacttgagcaaggtcatccaggtgaagaaggcgccgatgtagcccacaaacgccccgtagatccagggcgccccaaacacgcgaatcagccaggcggcgtccatcgccaagggctcggcgtgcaccgaggcgaacttgaagctgacctgcgccaaggtgtcgaaaatgatcagcgcgagaaaacccaggatatagaaacgtttcatcattcaaaccctacaacggtcacgccacaggcgatcagcatgatgccgatcaaccgccacttgctcaggctctccttgaacaggaaacgcccggcaatcatgatcaccacgatattgatcgagccgagcatcacgcccaccgacagcggcaccagcgacaggaacgccagccacaatacgaattcgaagacatagcagatcacgccgagccagatccacgggcgcttgagcatgtgcttccagtgggcgaggccgtcgtgttcggcgctggctgaggcggcggctttgaaggccaactggccggatgtatcaacgatgacgttgagtatccagaggatgatggttaactggctcatgtatttccgtcgtctgcttacaatcgcgctgagaccgtacgatacagcaggctgccggaggcgggattggagtttgccggtcaaacagcttgtgttcagtttgatgcattgccccattggcaatagcagcccaccgccagggtatgagtggcatcgacttcgcgcccggcttccagggccttgaggatcggctcgataaaactgttgctggaattgcacgtcagcccttcgctgtaggggccgaaatacgccagtttgccggtgcgatcccaaatgcccacggcaggtgtggccggtacctggtcggcacccgccagggccgtgagggttttcattttgcgcaggttgtcgggcaggttgccgtggcttccggctttttgcagggcatagaactcaacgccttggggtgcgtagtgctcgatcagctcgcccaagtgttgctggttgccgacattgcacgggcacgccgggtcccagaagtgcacgaggcggatcgggccggggcctgacagctcggcgggcaggcgcaaggtgtcgccggagaagaccgccgtgtgttcgctgaacgcgcgcaggtagcgcccctgaaaccagtcatacgcagcccacagcacaccggcgcagataaccaggagcaggctggcgaacaaggcggaacggtagggctgtcgcattcagatcaatcctcgaaggtcgcgtagcttgccatgcttgccctgacagatgaatatcgcagctcgatattcatcttcaccgcgagtctggaaccctttatgcctgtcagctttgaccccgatcatctgcgcgaaagcttgcgacccctggtggatgcgcaaccgctcagcgccgaagcgcgggtttaccagcgcttctacgggctggacctgccggcgcgcaaagagcctgtggtgagccgcctggggcgctttgaggtgggtgggtatcaagtggtggcgcaggtgtggtggccggcggtgccggtggcgacgatgttcatgtttcacggtttctacgatcacatggggctgtaccgccatgtggtggactgggcgctggaccagggttttgtggtgattgcctgcgatttgccgggccatgggctgtccagcggcgcgcgtgccagcattgatgacttttcggtctaccaggacgtggtgcaggcgctgtttgctcaggggcaggcgctgcacctgccgcaaccctggcacctgttcgggcaaagcaccggcggcgcggtggtggtggaccatttgctcaatcatggcgcgggcagcccggcccagggcaagacgttcctgttgtcacccttggtgcggccgcgtgcctggggctggtcgcaggtcagctattacttgttgcggcccttcgtcaaaggcattgcgcggcgcttcagcgagaacaccaacgacccgaaattcaaacctttccttgaagccgaccccttgcagccgcgccaactgccgaccgcctgggtgggcgccctggcgcgctggattaaacgcatcgaagccgcaccgcgcagcctgaggcggccggtgattgtgcagggtgaggaagacatgacggtggactggcagcacaatttgcaggtgctgcagggcaagttcgacaggcccgaggtgttgatgattgcccgtggtcggcatcatctggcgaatgagattccagagattcgtgatgagtacttcaagtacctcacgaaccacctgaagtaacccggtcgacatgtgggagctggcttgcctgcgatgcagacacctcggtgcatcaggtacaccgggttgatgccatcgcaggcaagccagctcccacacaagcctgtttccatatgggttactgcgacaggctggaggtgctctggccgacggcaagccctgcgcgaatggctgcaagcgccgccttgtaatacgcccgaccttccggcgactccgcaaacgtcgcgaattcttccagctccgggtcagacaaatcccggtaaacgtagagcaacgtgttgttcaaatcattgccgatctgctgcatcaagcgctcacgctgaccattcaacatgccttgcgcctgaccaccgcccaacaggccggggatcatctggctcaaactgtcggcggccacgccggcaatcgccaggctgacttcagcccccgcctcacgcgccggcagggcctgagcgaggtggccgatgatcaggctgcgggtggcgtcggcttgcatatgcggcaagccctgggcgtttttggccaattggtcgcggcgggtggcgagcaactcggcagcgacgattttgcggcccagcggcgactggaaaaacgcgagggcgggtttcggatcggtgaggttcttgcgcagttgcgcttcggcgcgttggtccaccgcctgggcggcaaagcgtttattactgttgtccaccagcgcctggtacaccgccggcggcaggctgttgcggtagcgttgctgggccgcactgagggcgtcgttgaaatgcgcacgttgttcggcccagccggcgaccttgtacaactggtcatggccgtctgcccaggcgggcaaaacgcagaacattagaagggaaaaaaacaaacgacgcatagggactcctgtcagtcggccactattgtccgtgtcgggcgtaggatttgtcgagaaatcctatcggctacatgactaaagtgtgttcagacgctcggcggctctgtcggattcacaggcgtatggatactatgcgcgccatgcaaacaccccttgaacacccactgctgcaacgcatcgtcgacgacctggccgaaaaaggctggtcgcagcaaaacggcttcctgccccaggctctgaccctggaactggcggctgagtgccgtaaacgtgcggccgagggtgagttggccccggcggcggtggggcgtgggccggcccaggagatccgcgagggcattcgcggtgaccgtattcagtggctggaagagggcgatgcagccgtctgcgaggcttacatgggcgtgatggatggcctgcgccaagcgatgaatcgcgggctgttcatgggcctggaagatttcgaaagccattttgcgatgtacccgcccggcgcgttttacctcaagcatgtggaccgttttcgcgacgacgaccggcgcatggtctcggcggtggtttacttgaatgacgaatggctgcccgaccatggcggccagctgcgcatgtacctcaaggacggcctcgaacacgatgtggtgcccaccggcggttgcctggtggtgttcctgtcgggcgaggtgccacacgaagtcctgcctgccacgcgtgaacgcctgtccctcaccggctggtttcgccggcgcggcaacgagccgttttaagcatggaaaagattctggtcagccgctgcctgctcgggcacaaggtgcgctacgacggcgcgggcagcgggccgtttgatcaattggcggcgtggcaggccgaaggtcgcgtggttgcgatttgcccggaagtgtcgggcggtttgccgacgcccaggccgcctgccgaaattcccggcgggcagggcattgatgtgtgggaaggccgtgcccgtgtgctgacttccgaaggcgaggattttagcgaggcctttctcgacggcgcccgccaggccctggcgttggtgcagcagcacaacatccgtattgccattctcaaggccaacagcccgtcctgcggcaacctgctgacctatgacggcaccttcagtggtgtgaaggtcagcggtgagggcgtgacggcggcgctgctcaagcgccatggggtgctggtgttcagtgagctggaactacccgaagctgcacaggcgctgaccctactcactgacccaacctagatcaactgtgggagctggcttgcctgcgatagcggtaggtcagcaactgctgggtgactggcataccgccatcgcaggcaagccagctcccacactgaccgtatttaccctgcctcaaaccacttctgcgtcatcgccttcaagcgcccatccgctttgatgtgctgcagcgccttgtccacgctgcttttgaacgccgggttacctttttggaatggaatggccagctcaggtgtttccttgtagacctcgctgaaatcgaaccgatcctgcagctcggcagtcatagcgatatggttgatggccacgtcgtatttgccggtttcaacgcccggcagcaggtcggtgtcatcggtggtgatgaacgaggggcgtacgtccatttccttggccagttgttcgcccagctctacttcaaagccggtgagtttatcgccgtccttgaagttgaaaggcggggtgttggcttcgagggcgatacgcagttcgccacggtcgaacacgtcgtcgatcagttcagcgtgggccaaggggctcaagaggggcagtaaaagtacaaggccaggcgaaaagcgcatggtcgctcctaaggaattcagctgtgcgaggcgccagtcagcatcgctttgctatggtgatgagtgccttggacagcaatttgtcgcgaagttgtcataacccaacagatttcatgcagaaactggagaagtgaatgaacgctctatttgcccgtgcaacgattgccagcctgctgctgggcgcctctatgttggccactgccgccgacggcatcccgcgcagcgcgccgcctgaaggcgccaaagtcttcatcgtgtcgcccaaagacggtgccaccgtcgacaagaccttcaccgtcaaattcggcatggaaggcttgaaactggccccggccactgaccagaccccaggcaccggccaccaccacctgctggttgaccagaaagaactgccggacgccagcgtaccgatcccggccaccgacaccgtgattcactacggcaaggcgcaaaccgagaccgagctgaccctcaccccgggcaagcacaccttgcagctggtggccggcgacaagctgcacatgcagttcaacccgactgtagcctcgaaagtgatcacggttaacgttaagtaagatttgttcagatgaaaaaaagggagccccgaggggctcccttttttgtggtgcaggtgaaaccttagaacaacacgcggctacgaatcgtgccgttgatgtgctgcagcttctcttgcgccaggtccgagtactcggcgtcgacgtcgatcaccacgtagccgaccttctcgttggtctgcaggaactgaccggagatgttgatgccgttttccgcgaagaccttgttgatctccatcatcacgccagggatgttctggtggatgtgcagcagacggtgcttgccagggtgagccggcagggccacttccgggaagttcacggacgataccgaggtaccgttgtcgctgtacttgaccagtttttccgacacttccaggccgatgttggcttgggcttcagcggtggaaccgccgatgtgcggggtcaggatcacgttgtccaggccacgcagcgggctttcgaagatgtcgtcgttggagcgtggctccaccgggaacacgtcgatcgcggcgccgatcaggtgcttgtccttgatcgcgtcggccagggcgtccagctcgaccacggtgccacgggcagcgttgatcaggatgccgcctttcttgatggcgcggatttccttctcgccgatcatccactgggtctcagcggtttccggaacgtgcagggtcacgatgtcggacatgcccaacagctcagtcaggctggccacttgagtggcgttgcccagtggcagtttggtcagggtgtcatagaagaacacctgcatgcccaagccttcagccagtaccgacaactgagtgccgatcgagccgtaaccgacgatacccagctttttgccacggatttcgaaggagttggccgcgctcttgatccagccgccacggtggcaggaagcgtttttctcagggatgccgcgcagcagcaggatggcctcggccagcaccagctccgcaacggaacgggtgttggagtacggtgcgttgaacaccgcgatgccgcgctcgcgcgctgcgttgaggtcaacctggttggtgccgatgcagaaacagccgaccgccacgagtttcttggcgtgatcgaagatctcttcggtcaactgagtgcgggagcgaatgccgataaagtgcgcgtcggcgatcttttcctttaactgggcttccggcagagaactggtgatgtactcaatgctggtgtacccggcggccttcaggacgtcgacggccgatgggtggacgccttccagaagaaggaacttgatcttgctcttatcgagagaagtcttgctcatctgcgtaaacctgtatcccggagaaaaatggcagggaatcggatcacgtaagctgacccggacggcaggaaagccgtcaccgcagaaacgcccttgggctctgtcctgcgggggcggtatgctagcatacgcgccccgctaaacacctattcctgcgacgtgaagcgttctcaggatgaccatgaattgttcgagagttctgtcgatgacccatcctgccctgattgatgagctaaagaccctggttgagcccggtaaagtgctgaccgatgcagactccctggaggcttacggcaaggattggaccaagcacttcgcacccgcgccggtcgccatcgtgttccccaagaccaccgagcaggtgcaggccatcgttcgttgggccaatgaacacaaggtggcgctggtgccatcgggcgggcgtaccggcctgtcggcggcagcggtcgcggcgaatggcgaagtggtggtgtcgttcgactacatgaaccagattctcgacgtgaacctcaccgaccgcaccgccgtgtgccagccgggtgtggtcaccaagcaattgcagaacgtcgccgaagaaaaaggcctgtactacccggtggacttcgcgtcgtccggttcgagccagattggcggcaacatcggcaccaatgccggcgggatcaaggtgattcgctacggcatgacccgcaactgggtggcgggcatgaaagtcgtcaccggcaaaggtgacgtgctggaactgaaccgcgacctgatcaagaacgccaccggctacgacatgcgccagctgttcatcggcgccgaaggcaccctgggctttgtggttgaagccaccatgcgcctggaccgtgcgccgaaaaacctcaccgcgatggtgctcggcaccaccgacttcgactcgatcatgccggtattgcacgcgttccagagcaagctggacctgaccgccttcgaatttttctccgacaaggccctggccaaggtcatgggccgtggcgacgtaccggcgccgttcgaaaccgagtgcccgttctacgcgctgctggaattcgaagccaccaccgaagaagtcgccaaccatgcgctggaaaccttcgaacactgcgtggagcagggctgggtgctggacggcgtgatgagccagagcgaaacccaattgcacaacctgtggaaactgcgcgagtacatctccgagaccatttcccactggaccccgtacaagaacgatatttcggtgactgtctccaaagttccggcgttcttgaaggaaatcgatgcgatcgtcggcgaacactatcctgacttcgaaatcgtctggttcggccacatcggcgacggcaacctgcacctgaacatcctcaagccggaaaacctgagcaaggatgagtttttcgccaagtgcgccaccgtgaacaagtgggtgtttgaaaccgtcgagaagtacaacggttcgatctccgccgaacacggcgtgggcatgaccaagcgcgattacctgacctacagccgttccccggttgaaatcgaatacatgaaagcagtgaaagcggtgttcgacccgaacgggatcatgaaccctggcaagatcttcgctgtttaaccgcccctgaaggagtcgttccatgagctaccagcacaagtatgtcgacggcaccaacatccacttccccctgggtaaagtggtgtgcatcgggcgtaactacgccgaacacgccaaggaactggacaacccggtaccgaccgaaccgttgctgttcatcaaaccgggcagttgcgtggtggcgctggaaggcggtttcgccattccgaccgagcgcggttcggtgcattacgaggcggaaatcgccgtgttgatcggcaaacccttgtcgaccaagcccagccgcgaagaagtgctggacgctatctccggcttcgccccggcgctggacctgaccttgcgcgacaagcaggccgaactgaaggccaagggcctgccctgggaaatcgccaagtctttcgacggcgcggcagtgattgccccgttcgtggtcggcagcacgttcccggacgtgaccgacatcggcatccgcctgaccatcaatggccaggtgcgccaggacggcaacagttcgcagatgctcaacccgatcatcccgatgatccagcacatggccggctgcttctcgctgcaggccggtgatgtgatcctcaccggcaccccggtcggtgttggcccgctgaatgtgggcgatgagctggtgctggagctgttgggcgcaagccgcttcgaaagcagcgttcgctaaaggctgaatacagtccaaatgtgggagctggcttgcctgcgatgacggtggtgaattcactggcgccatcgcaggcaagccagctcccacaggggtgtgtgtcccaggcctcggcttttgcatttttttcacaccgcatccggataatccccagctcctgcgcgcgggccgtttgatcctgtgctatcacctaaagctgactccccggaaaagcgccccatggccgtgcccctgccttcgatcacctccaagccccgctcccgctttgccctgcgctggtattcctggctgttcctggccggggtgattgtgtatggcgtttcatgggccatgcattgggatgatcgcggcgtgttatgggtcgctgagcgctttgaaacgccggctgaacagcaggccagcgtctggctgccggactaccacgcggtcatcgacggcaagttgctgcccggtatggaaaaggacgaggcctctgacgtttcctacaacccgcagaccaaaaccctgttttccgtcatgggcaaaaaccctttcctcgctgagttgagcctgcaaggcgacgtgctgcgcaaaatgccgctcaatggctggaacaacccggaaggcgtgacggtgatggaaaatggcctgatggccattgtcgatgagcgcatgcacaccctgaccgtggtcaaggtcgatgccagcactcagcaactgaacatcgccgacttcaagacctacgacctgggcccgtccaaagaccagaacaaagcctttgagggcatcacttgggacaagcgcaacgggcagatcgtactcggcgaagagcgcccgcctgcattgttcacctggaaaagcgacggcgccacgctgatcggcgacaagcaaaaagttgccagcaacgagctggacatgcgcaacctctcggccctggccgttgacccgcgcaccgggcacttgctggtactatcggccgactcccacctgttgctggagctggatgaaaagggcaagcaagtcagcttcatgactttgctcggcggtttcaacggcctcaagcacaccattccccgggccgaaggcgtgaccatggacgagaacggcacgctgtacatggtcagtgagccaaacctgttctaccgtttcgaaaagcaaaaataacccacgattacgtcggatattgctccaggaacggcattcgccagacatcgggcagcgtttaagtttaaattcagacgggcgtgatattcattcgccacttttgattttgagccctgtcgatgcgccgatttgcacgccccaaacccgcgtttctcattctgttgttgatcgccctggctacggccggggtggtcgcgcagcagtttcgtttgttcgaacgcgcgtggttcaactggcaggcctggcaccagcctgcggatgagcgctccatcggcctggccgattaccgcgtggtggtcgagggccaagtgattgaaggcctcaacgatgacgtctcggcactgacctacgacccggtacgcaaaagcctgtttaccgtcaccaacaaaaacgccgagctgatcgagctgtccctggagggcaagatcctgcggcgcattcccctggtgggctttggtgatgccgaggccgtggaattcatcagcgacaacatttatgtgatcagtgacgaggcccagcagcggctgatcaaggtgcatgtgaacgacgacacccaattcctcgacgccgccgacgcggagcagatgacgctgggcgtgcacatcggcggcaacaaaggcttcgagggcctggcttacgactcggtgggcaagcgcctgttcgtggccaaggagcgcgacccgatgctgatctacgaggtccacgggtttccccactttaagccggaaaaaacctactcggtgcacgtgatcaacaaccccaagcgcgatgccgggttgtttgtgcgtgacctgtcgagcctgcaatacgatgagcgcagcggccatttgctggcgctgtccgacgagtcgtttctggtgttggagctggatatcgacggtcggccgttaagcagtctgtctttgctcaacgggcgccatggcctgaaaaaacgggtgccgcaggccgaagggatcgccatgggcgatgatggcaccctgtacctgaccagcgagccaaacctgttctacgtgttcaagaaaccaactctctgaaacagcacagggtccatgtgggagctggcttgcctgcgatggcatccgtgaattcaccaccgtcatcgcaggcaagccagctcccacataaagcaaaagcagtcgtgcttaggccttgagggttttcacgccttcaggagtgcccagcagcaacacatccgccgggcgtgccgcgaacaaaccattggtcaccacgccgacgatggcgttgatttgcgtctcaagctccaccggattggtgatctgcatattgaacacatcaaggatgatgttgccgttgtcagtcaacacgccttcgcggtacaccgggtcgccgcccagcttcaccagttcgcgggccacgtggctgcgggccatcgggatcacttccaccggcagcgggaacgcgccgagtaccggcaccagcttgctgccgtcggcgatgcagatgaaggtcttggccacggccgcgacgatcttctcgcgggtcagggctgcgccgccgcctttgatcaggttcaggtgtgcgtcgctttcgtcggcaccgtcgatgtagaactccaagtcgctcacggtgttgagctcgtacaccggaatgccgtggcctttcaggcgcgcggcggtggcttcggagctggctacggcgccgtcgaatgcgcccttgtgctgggccagtgcatcgatgaagcagttggcggtggagccggtgccgacaccgacgacgctcttgtcgtcgagtttgggaaggattaaatcgacggcggcctgggccactgcctgtttgagttgatcctgggtcatgcgggctccggaacgggcggggactaaagaggggcgcgagtataacccaacaaaacctcgggattcgtgtggtcgtacggtcaaaagccgggttagactcctcggccctgcccagcccgctcagtgatgctttccgatgcttgaacagtacgtcaaaaagatcctcacctcgcgcgtttacgacgttgccgtagaaaccccgttgcagaccgcccgccagctctccgagcggctgggcaacaaggtctggctcaagcgcgaagacttgcagccggtgttctcgttcaagattcgcggcgcctacaacaagctgacccagttgaccagcgaggagcgtgcccgcggtgtggtcacggcgtctgcgggcaaccatgcccagggcctggcgttggccgccaaggtgctgggggttaaagccaccatcgtgatgcccaagaccacccccgagatcaaggtcgaaggtgtgcgctcccgtggtggcaaagtggtgctgcacggcgataccttcccggaagccttggcttactcgctgaaactggtcgacgaaaaaggctacgtctacatccacccttacgatgatccacacaccattgccgggcagggcaccgtggcgatggagattctgcgccagcacccggggccgctggacgcgattttcgtgccggtcggcggcggcgggctgatcgccggtattgcggcgtacgtgaaatacctgcgcccggagatcaagatcatcggcgtcgagccggacgactccaactgcctgcaagccgccatggccgcaggcgagcgcgtggtattgccgaccgtgggcatctttgccgacggtgtggcggtggcgcagatcggccagcacacctttgaaatctgcaaagactatgtagacgaagtgattaccgtgagcaccgatgaaatctgtgcggcgatcaaggatatctacgacgatacccgctccatcactgagcctgcgggcgccctgggcgtggcggggatcaagaaatacgtggagacccgtggcgtgaccgggcaaaccctggtcgccatcgactccggcgccaacgtcaacttcgaccgcctgcgtcatgtggccgagcgcgccgagctgggtgaaggccgcgaagccatcatcgccgtgaccatccccgaaaaaccgggcagcttcaaggcattctgcgaggccgtgggcaagcgccagatcaccgaattcaactaccgctaccacaccggccgcgaggcgcacatcttcgtcggcgtgcagactcacccggaaaacgacccgcgcagtgcgctgatcgccagcctgacaagtcagggtttcccggtgctggacttgaccgagaacgaactggccaagttgcacatccggcatatggtgggtgggcacgcagcgaaagtcagcgacgagttggtgttccgcttcgaattcccggagcgtccgggcgcactgttcaactttcttaacaaattaggcgggcgctggaacatctcgatgttccactatcgcaaccacggcgcggccgacggccgtgtagtcgccggcctgcaagtgccggcggacgagcgtcacctggtgccggccgccctggcggaaatcggctacccgtattgggatgaaagcgaaaacccggcctaccagctgttcctcggttgagcgactacgctgactgagcggcccttaaggaatagagaccatggaaacgctgaccaccctcaaggttatccacatcaccgccaccgtgttgttgctgctcagcggccttggcctggctgtgctggcctggcgcaaacgcagcgctggcccggcagtgaccgtgcaacgcccgtgggcgtttgtgtggctgctgatgggggtttgcgtggtcagcatgccgtttaccggctggtggctggcgcatttgatcggctggccgctggggcaaacctggattctgggctccagcatcctctacaccgtggcggcgctggcctggttctggctggtggcgcggcttaaccggctgcgcaagggtgagggcggcagcctgaatttcacgctggtgctggcggtggtcagcctggtggggtttgtggcgattgccgggttgatgggcgccaagccggtttaggggttcggaccgcgtcgtctgcatcgcaggcaagccagctcccacatttgacctcattctcatgttggaactcggtcaagtgtgggagcgggcttgcccgcgaacgggccatcagccgcgcaatgtaatcaccggccagccacgcttctcggcctcagcccgcaaattcggatccggatccaccgccaccgcatgcgtcacctgctccagcagcggtaagtcattcatcgaatcgctatagaagtagctgtcttgcaggctatagccggtctcttccagccagcgattcaagcgcgtcaccttgccttcacggaagcacggcacgtcagtgctgcgcccggtgtagcggccattttccatctcgcactcggtggcgatcagggtttcaacgcccaggcgtgctgcaattggcgcggtgacgaaacggttggtggcggtgatgatcaccagtttgtcgccggcggcgcggtgtttggccagcagctccacggccagcggcagcatcagcggttcaatgcagtcgcgcatgaagtcgttgtgccattcgtccaactgggccatctcggtgcggccgaggatttccagactgaagttcaggtaggcggcgttgtcgagcttgccggccaggtaatcctggtaaaactcatcgttgcgggccttgtaggcgatagggtcgagaatcccgcgttcacagaggtaatcgccccacgcgtgatcgctgtcaccgccgagaagggtgttgtccaagtcgaataaagccaggcgcattgcagttactcgctgaaaagtctgtaaaaaggcgtccagaatacggtcttttcacaagagtgcacataaggtaagaagcctcgttgccgcttgatgaacctttgtggaacaatgcggcgacatgcgtttgcgaggttgttgccgtgatcgaccccgatggtttccgtcctaatgtcgggattattcttacgaatgatgccggacaggtgctatgggctcgccgaatcaaccaagatgcctggcagtttcctcaaggcggaatcaaccccgacgaaacccctgaagacgccttgtaccgtgagttgaatgaagaagtcggccttgagcgcgaagatgtgcaaattctggcctgtacccgtggctggttgcgctatcgtttgccgcaacgcctggtgcgtacccacagccaaccgctgtgcatcggccagaagcagaaatggtttctcctgcgcctgatctccaacgagcagcgggtgcggatggatttgaccggtaaaccggagttcgatggctggcgctgggtcagctattggtacccgttgggccaggtggtgacattcaagcgcgaagtttatcgtcgcgctctcaaagagcttgccccgcgccttttagcgcgcgactgacgacggagttcgaccccgagccatgctcaatacgctgcgcaagatcgtccaggaagttaactccgccaaggatctcaaggcggcgttggggattattgtgttgcgcgtcaaggaagccatgggcagccaggtctgctcggtttacctgctggaccccgagaccaaccgttttgtgctgatggccaccgagggcctgaacaagcgctccatcggcaaggtcagcatggcgcccaatgaaggtctggtgggcctggtggggacgcgtgaagaacccctgaacctcgaaaacgcggccgatcacccgcgttatcgctactttgccgaaaccggcgaagagcgttacgcctcgttcctcggcgcaccgatcattcaccaccgccgcgtcgtcggcgtgttggtcatccagcagaaagaacgccgccagttcgacgaaggtgaagaagccttcctcgtgaccatgagcgcgcagctcgcaggcgtaattgcccacgccgaagccacgggctcgattcgcggcctgggccgtgaaggcaagggcatccaggaagccaagttcgtcggtgtgccgggttcgccgggcgcggcggtcggtacggcggtggtcatgctgccgccggcggatctggacgtagtgccggacaagaccgtcaaagacatcgacgccgaaatcaaactgttcaagaccgcgctggaaggcgtgcgcgccgacatgcgcaacctgtcgaacaagctggccacccagctgcgcccggaagagcgcgcgctgttcgacgtgtaccagatgatgctcgacgacgcgtccctcgggaacgaagtcaagaccgtgatcaagaccggccaatgggcccagggcgcgttgcgccaggtggtcaccgatcacgtcaatcgttttgaaatgatggacgacgcttacctgcgcgagcgggcctcggatgtgcgcgaccttggtcgccgtctgctggcctacctgcaggaagaccgtaccaccaacatggttttccccgacaacaccattctggtcagtgaagagctgaccgccacccagctcggcgaagtgccggagggcaagctggtggggctggtctcggtactgggttcgggtaactcccacgtcgcgatcctggccagggccatgggcattccgacggtgatgggtctggtagatctgccgtacgccaaggtcgacggcatcgatatgattgtcgatggccatcgcggtgaggtcttcaccaaccccagcgaagtactgcgcaagcaatacggcgaggtggttgaagaagagaaacaactggcgctgggcctcgattcgttgcgcgagttgccgtgcgtgaccaccgacggccaccgcgtgccgctgctggtgaacaccggcctgctcgccgatgtcgcccgcgcgcaacagcgcggcgccgaaggggtaggtctttaccgcaccgaagtgccgttcatgatcaaccagcgttttccgagcgagaaggagcagctggcgatttatcgtgagcaactgcaagccttccacccgttgccggtgaccatgcgcagcctggacatcggcggcgacaagtcgttgtcgtattttccgatcaaggaagacaaccctttccttggctggcgcggcattcgcgtgaccctcgaccacccggaaattttcctggtgcagacccgcgccatgctcaaggccagcgaaggcctgaacaacctgcgcatcctgctgccgatgatttccggcacccatgagttggaagaagcgctgcatttgatccaccgcgcctggggcgaggtgcgcgacgaaggcgccgacgtgccgatgccgccgattggcgtgatgatcgaaattccggcggcggtgtaccaggccaaagagctggcgcggcaggtggacttcctgtcggtgggctccaacgacctgacccaatacctgctggccgtggaccgtaacaacccacgggtcgccgacctctacgactacctgcacccggccgtactgcaagccctgcaacacgtggtgcgcgacgcccatgccgaaggcaagccggtgagcatctgcggtgagatggctggcgacccggcggcggcggtgctgttgatggcgatgggctttgacagcctgtcgatgaacgccaccaacttgccgaaggtgaagtggatgctgcgccaggttgagctgagcatggccaaggagctgctggcggagctgatgactatcgacaacccgcaagttatccacagttcgttgcagttggcgctgaagaacctggggctgacgcggatgatcaacccggcctcggcgaaaaccctctagaccgaagtatggccatcgcaggcaagccagctcccacatttgactgtgtacgcagttcaaaaggtgggagctggcttgcctgcgatgaggccagtccaggcaccactaaatcatcagctctacttcccccagccgcccaccatgcggcccaaaactgcgctccaccatccgccgcgtcccgtctgcattcacaatcaacaccgtgctcgcccgcgtcccgtaactggggctggcgataaacacgctggacagcaagctttccgtggccaaccccacgcccgtatccggcaagtccgcaaacggtgctgtctgcggatcactcaaaattcccagcaaggcctccggctgtgggttctccagcaagccgcccagtgccgccctggccttgagcaacttcggccacggcgtattcagcccggcattggatagcccgtacaccccggcctctaaccgcgtcggctcggtgtcattggcgttgtagtgccacagctcatcccgtgtacctgccaacaggttaaacccggcatattcaatcgaacggccattaacgtcggccaaatactcctcaatgggcaaagaacccttgagaaaccgcgccaccaattccccgcgggacttgcgtgccggcggctggtgcgggtcgcgaatattggttagcgcagcaaaacgcccgtcggcattgaccccaagccaagtgccgccggcttcctgatcgcgcccggcgtagatatagggggcgtcgggccactgggccagcgccaggctggggcgggcgtagaactcatcacggttggccgcgacgatcagcggttgggcatggcccggccgccaggcgaaaacaatcaggcacatcaggtgatcccttttgtgttttccctcactctaccgacacaacggcaggcgttccatcgtatcgaagttgggccgcacgccttccatccgttaacatgccagcctatttggcgtgtgcgaacttcttaatttgatatagcggctgtaacgcaggcttaatcgcacaccggcatggtccggtgcgccatgactaatgatttaacgaggagtcgcaatgctgccttacccgcagatcaacccggtggccgtggccatcggtccgctgcaaatccattggtacgggttgatgtacctgatcggcatcggcggtgcctggctgctggcttcccggcgcctgaaccgtttcgacccgacctggaccaaggagaagctctccgacatggtgttctggatgtcgatgggcgtcatcgtcggcgggcgcctggggtatgtgctgttttacgatctgccagcctacatcgccaacccgacgctgatctttgaagtgtggaagggtggcatggcgttccacggcggtttcgtcggcgtgatgatcgccgcttggtggttcggccgccgtaacggcaagtcgttcttccagttgatggactttgtggcaccgttcgtgccgatcgggctgggcgcggggcgtatcggtaacttcatcaatgccgaattgtggggcaaaccgagtgacgtgccgtgggccatggtgttcccgccgttcagcgacccggcgcaactgccgcgccacccgtcgcagctttaccagttcgcgttggaaggcgtggcgctgttcctgatcctctatatcttctcgcgcaagccgcgcccgaccatggccgtgtccggcatgttcgcgctgttctacgggatcttccgctttatcgtcgagttcgtccgcgtgccggatgcacagctgggctacctggcgtggggctgggtgaccatgggtcagattctcagcctgccgatgatcatcgctggcctgggcctgctgtggtgggcttacaatcgtccgcagccgatcaagaacgcctcgctttaaactcgaacgccggggcttgcgagccccggcttctttgatacaggtacacacatgaagcaatatctcgaactactgaacgacgtcgtgaccaatggattgaccaagggcgatcgcaccggcaccggcaccaaagccgtgtttgcccgtcagtatcggcataacctggccgacggcttcccgctgctgaccacgaaaaagcttcatttcaaaagcatcgccaatgaattgatctggatgttgagcggcaataccaacatcaagtggctcaatgaaaacggcgtgaaaatctgggacgaatgggccaccgaagacggcgacctgggcccggtctacggcgagcaatggaccgcctggccgaccaaggacggcggcacgatcaaccagatcgactacatggtcgacacgttgaagaacaaccccaacagccgtcgcatcctgttccacggctggaacgtcgaatacctgccggacgaaaccaagagcccgcagcaaaacgcgcgcgacggcaagcaagccctgccgccatgccacctgctgtaccaggcgttcgtgcacgacggccacctgtcgatgcagttgtatatccgcagctccgacgtgttcctcggcctgccgtacaacaccgccgccctggcgctgctgacccatatgctggcccaacagtgcgacctgatcccccacgagatcatcgtcaccaccggcgacacccacgcttacagcaaccacatggaacagatccgcacccaactggcgcgcacgccgaagaagctgccggaactggtgatcaagcgtaaaccggcgtcgatctacgactacaagttcgaagacttcgaaatcgttggctacgacgccgaccccagcatcaaggccgacgttgccatctgacgcctagatgcaggtgtagcccgcatccgcattgatgatcgagcctgtgagcaggctcgacgcatcggaggcgagaaattgcaccagcgacgccacttcatggggctggcccatgcgcccggcgggggtcaaatccagccagcgctgaatcaaccccggctggctttccaggccatgcagcaagggcgtttcgatataggtcggcgccactgcattcacccgcaccccacgttttgcccactccaccgccaatgacttggtcaattggtgcacgcccgccttggacgcgttgtagtggcattgcggctgcggcacattcaccacctgccccgacatcgacccgatattgatcaccgacccgcgcccggcttccagcatgcgccggccaaacccccggcaggtgcggaacacgccggtgaggttgacggtgatgaccttgtcccattcctcgtcggtcatttcctcggcgggcgtgttggtgacgatgcccgcgttgcacaccaggatatccagcgggggaagcgacgtagcgagggcgttgatcgcggcgctgtttgtcacatccaaggcttcggcgcgggcggcatagcctttctcgatcaactgctgcgcagtcgccaaggcccgggcgtgcaggatatcggtgcagatcacctcagccccggtcgccgccaaggcttcagcaatcgccgccccaatgccctgaccggctccggtcaccagcgccagcttgccgttcagggcctgtttttccgaataattcattgatcgtccctcaacacaaatggaaaagcagttgcgcgcactgcccttgtggcgagcgggcttgccccgcgttgggttgcgcagcgaccccaaaaatgggactgctgcgcagtccagcgcggggcaagcccgctcgccacagaggcctatgttcaagtcaacgcacagcgcagtgcctctccacgcaagccgcgcaaggcctcttcactcgccaaccgctgcaacgcatccaccgacgcatcggaaaaaaacgctgcatggggtgacaccagcaaatgcggggccttgcgcaacggcgaatccgccggcaacggctccttctcaaacacatccagtcccgcgcccgacagttgcccactgaccagcgcctgggccagcgccgtctcatcaatcaggccgccacgggagcagttgatgagaatagcgcccctgggcatccgcgcgatggcctcggcatcgatcacgtggcgcgtctcgggcgtcagcggtacatgcagcgacagcacgttggcacaggcaatcacttcggcgcgcgacatcggctcaatcccggattcccgcgcttgctggttggtcacatacgggtcataacccacaatcgtgcaaccaaatgccgccatgcgcgacgcaaacgcacgagcaatgcggcccaggccgatcaggccgacggtggtgtcgcgcagggagcgcacgccatcgaccatctgcgcgatcttccactcgccattgcgaatgccgctgccgtaatgatcaagcttgcgcgccagcgccagggtcatcgcggcggcgtggtcggccacctcttcaacgccataatccggcacgttgcacacccgaatccccagctctttggccgccgcgaggtcgacgttatccacgcccacgccatagcgcaccaccaccgcgcccggtgccatggaggccatcacgcggtgggtcatcggcgcgaagttattgatcaccgcatgggcgccgcgcacggcttccagggtttcgtcttcgctgcggcactggtgctcgaagaactgtgcgccgacgagtgcggcagcggcctgttcatggcgcgtgttgccgaacgcctggtcggtcactacaaacttctggctcatagcagcccccgttttgccaggttgcgcatcaacgcgcgggtgccgtaggtccagggcgctgcttcgtcggaatacacgacggtattgcgcaaggtgcccagcagcggcgaggaaatttccaccagatcaccggccttgtgggtaaagcccgaaccctttttctcgcggtcctgggtcggcgcaaacatggtgcccagaaacagcatgaaaccgtccgggtactggtgggatttgttgcgggtctgctcgaccagattcgccggcttgcggctgatctcggccatgttcgaaccgccggacatttcaaagccgtcgaggccgctgaccgacagggtcagggtggcgttttcaatgtcggtcagggtgaagtgctcatcgaacagacgaataaacggtccgatggagcacgaggcattgttgtccttggccttgccgagcagcagcgccgagcggccttccacatcccgcaggttcacgtcattgccgagggtggcaccgcgaatgttgccttggctgtcgaccgccagcactacttcgggctcggggttgttccactcggaaatacggttgatgcccacttgcgcgccgtaaccgaccgccgccatgggctgggatttggtgaacacctcggcgtccgggccgatgcccacttccaggtattgcgaccacaggccttcggcaatcagcgcggccttgatctcggccgccttggcggaaccggcctgcacattggacaggctgtcgccgatcaacgagccgatcagcgcgcgcagctcattggcgcggccagggtcgcccgccgtgcgttcatcgattacgcgttcgaccatacttctggcaaaggtcacgccgcaggccttcagcgcctggaagtcgcagggcgcgagcaggcaagggcggtccgagtgatagcccatctcggagggttcaaggatcaagtctgcgaggtcgcccaccggctcaccggccagggtgtcgaagcgttcggcagggttgttgtcgaggaaatcggccatggacacccccgacggcgtgacgtcgatcagcacgttttcgcgcaggatcaccacacaaggccccttgccgggaagccagacccgaccgactaatttggcgtgtttgagtgagatgggcagcatgagggtgttcctttattgtttgatatctagtaatgctacgtttcgattttgagagcggtcaagcgatcctgcatgaaagaaactgcatttttcgcgataaaaaccacgttttaagactaatttgctgaaaaataaggcgaatattaagtgtttcagacgctggcgcacatttatggtgcaaaagccgtgtggatgaattttcaccggactattgcaaaaagctagcaatactatattttcgaattaagcgagtggttcaaccgcccagacaggtgacggagcagttcgatgcataacaataagattcacggcgacacgattgccgcgctgcaaggcgccttgtttatcgatggtcagctgcgcaaaggcgctggcgcccagttgccggtcgagaaccccgcaacgggtgaagtgctggggcatatcgctgctgccacgccgcaagagatcaacgagaccgtggcggctgcacgccgtgcctttctactgtggtcccgcgaactgcccaaaacccgcgccagtgccttgcatcgtttgggcgacctgatcgccgccgatgcgcagaccctggcacaggtgatgaccgccgagcagggcaagcccgtcaatgaagcccgtggcgaagtgctcaagctcgccgaggcctgccacttctatgcagaagaagccacccgcgtgcacggcgagatcgtacccaacgaccaaccgggtttccaaagcctggtggtgcgcgagccgataggggtagtcgctgcgattacgccatggaactacccggcagagctggtcggctggaagctctgcgcgagtctggccgcgggttgcaccatcgtcatcaaacctgctgaattgaccccgttcaccgcgctggccattgcgcaaaaatgcatcgatgccgggattcccgcaggcgtggtcaatgtgctgaccggcaagggctcggtggtcggccaggcgctggtcgaacacccggatgtcagcaaagtcgcgttcaccggctccagtgccgtgggcctgcacatccagcgcagttgcccgcaggtcaagcgcctgtccctggaactgggcggcaactgcccgatggtggtcaccgccagcgccgatgtcgccgccgccgtcaaaggtgccacccgccgcagcttccgcaattgcgggcagatctgcatcgcgatcaaccgcatctatgtgcaccgttctatctacgaagcattcgtcacccagctgggcgccgccgccgaggcgctgacggtgcgcaacggcctggaaaaccccggcgccgatttgggcgcaatgacctccgctgaacccctgaacaaaacccgcgcccaccttgaagacgcgctggccaaaggcgcacgtctggtcgctggcggcaaggcgcccgaaggtgaggagttcgcccacgggcatttcttccgccccaccgtggtcgcagactgcacccaccagatgctggtgatgagcgaagaaaccttcggcccgctggtgggcgtggcgccgttcgatgacctcgccgaagctgtgcaactggccaacgacacgccttacgggctggcctcctatgtgtatgcccgtgacttagtagatatccacaccctgtcggcgcagctcgactacggcaacgtggcgatcaataacgtcgacgctgggatcatgaatgcgccctacggtggccgcaaacaaagtggcgtgggttacgaacacgggcgcgaagggctgctggagtacttcaacttcaagcatgtgcgcctgcaccacggcgtcgggaattgagccatgcaggcccttattggtatcgacatcggcacctccgggtgcaaggcgttgctgctggacgcccagggcgcggtgattgccgccgacacggcgacgtatccgctgtcccaaccccggcccggctggaccgagcaagaccctgaactgtggatcgacggcgctcgccgtgcgattgccggggtactggccaaagcgcccggcgtggagttgctggcggtaggcttgtccggccagatgcacgggctggtgccgctcgacgccgcgcaaaaagtcctgcgcccggcgatcctgtggaacgaccagcgcaatgccgccgaatgcgagtggatcacccaggcagcgggtggccttgaaggcctgctggcggccaccgacaaccgcatgctggtgggctacaccggcggcaagattgtgtggatgcagcgtcatgaacccgagctgttcgcacgcctggccacggtgctcaaccccaaggattatttgcgcctgcgcctgaccggcgaaattgccagtgaagtgtcggatgcatcgggcaccggcctgttcaatgtacgttcgcggcagtgggcgacggggctggtggagacgttggggattgatcccgcgttgctgccaccggtgtttgaatcccaagtgatttccggccgggtcagcgcccaaggcgcccagctgtttggcctgccggtgggcacgccagtggccggtggcggcggcgattcagtgatccagaccctcggctccggtgtgattgcgccgggcgaattgcaaaccactatcggcaccgccggcatcctcgccgctgcgctggacaccccccaggacaaccccgacggccgcctgcagatcttctgcaacgtcgccgccgacaagtggcattgcatgggcgtgtcgttgaacgctggcggttcgatgaactggtttcgcgacaccttctgcgccggcgtgccctttgagcagatcgctgccgaagccgccgacagcccgcccggcgcccatggcctgctgtttttgccctacctgaatggcgagcgttgcccctatcccgacccggttctgcgggccgcctttatcggcctcaccggccgccatcaacgcggtgatatggcccgcgccgtgatggaaggctcggtctacgcccttgccgacatgtacgcgctgatgcgtccgctgggcatcgccgggcaggtgctcaaggcgtccggtggcggtgcgcgttcggtgctgtggcgccagttgcaggcggacattttcggctgcgacgtggtgaccaccgagggtgcggccgagggcgctgcgttcggcgcggcgctggtggccgggctggcggtcaatgtatggcccgacgcggcgagtgccgccgccagttgccgtgcgatgacccgccaggcgcccaatggcgccacggccgaagtccacgcccaggcccaccgcatctatcgccatttgtacccgacgctcagggaaacatttgttgagctcggcgcccctcttttcgattaggagtctttttcatggccgtctataacgcgctgatttttgatctcgacgggacgctgatcgacagtgcctgcgatatcgcgaaggccctgaatgtcggcttcatgctgaacggctggccggaactcgatccggatcatgtggaaaaattcctcggcaacgggcctcggcgcttgatcgtcgacatcctcgaagacttggacattccctacaccgaaacccaggtgcagtgcgcgtttgaaggttatttgcaggcctatatggacgacccggcggggcgcacgcggttttatccgcatgtacgcgaagacttggtggcgctgcgcgaagccggaattcgcctgggcatttgcaccaacaaaaaccatgccgtcaccggcaaggtcctggagcaactgggcctggcggatttgttcgatgcggcgatcggcgccgacgccgtgcccgcctgcaaacccgaccccggccacttgctcgcggtcgccgacgccatggcgctggccgatggcacgtgggcttatgtgggtgacacccgcgtcgaccaacaaaccgcgcgcgccgccggtgtcgccttttttgtggtgccgtggggcggtggcccgttggtggagatttctgcggcgcagcgcttgaaccgtttggctgatctgttacaacgcagcccacccatcgccaaggagcgcatatgagcgacagtttgctgcaacgcatcattgatgaaagcaagaacatgcaccgcgccgagcgccgggtggccaatttcgtctccacctcgccgtccaaagtgctgcagatgagcatggccaaattgtcggaaacctgttcggtcagcgacccgaccgtgatgcgtttctgccggcgttttggcttcgagagttaccaggccttgaagctgcacctggtgcagagcctggtgccgtcggcgccgtttgcctacgagcagatcatcccggatgacagcatcgacaacattgtgcgcaagacctgccgcaattcgctgaatgcgattcagcgcctggaagaagacctggagccggaaaaagtcgccgaagccgcgcagttgttgcaagccgcgagctgggtaggcatctacgccaccggcatttcggtggtcaacgcgctggacgccgagcacaagttccagcgcctgggcatgcgctgccaggccttgctcggtggcaagcgccaggaaatgcacgccgaaggcgcacgcagcggtgaagtcgcgctgatcttttcgcagtcgggccacacccggcagatggtcgacatggccattgccgcgcgcaaggccggggccaaagtggtgtcgattgccgccgatgacagcccgctggcgaaagtctctgacgtgctgatcgccgtgaagccctatgaacacaccgagctgatgacgccgctggcgtcccggctcaaccaccacttggtcaccaacatgctggtggcggcgattgccatcgccagcggcagtcagttccccgatcaactgaccgctctggattcctggcgtaccgacaaaatttaaaccccgatccgtggagcaggtaatgagtaatcaacagaacgaagccaagaaggtcgccgcccgccgggtgatcgaggaatttgtgcgcgatggcatgaagttgggcctcggctccgggaccacctcgcatttcttcgttcgcgagctgggcaagcacgtggccaacggcttgaaactgacctgcaccaccacctcgcgctccactaatgacgtggcgcgggaagtcggcatcgaaattaccgaccccaatgaaatcggcgagctggacctgaccgtcgacggccccgacgagatcgaccgccagttcaacatgatcaagggcggcggcgcctgcctgctgtgggaaaagatcatcgcccacgcctccaaacgcatgatctgcgtgaccgacgaaaccaagatcgtcgaccgcctgggcgccttcccgctgccggtggaagtggtgcagttcggctggaagcagaccgagcgcctggtcaagcgcgtgctggccgaacacggcatcaccgaggtacagatcatccgtcgcgaacgcaacggcgagaccgtggtgaccgacagcggcaacttcatcctcgactgccattgcggcccggtgatcaccgacccggcgcccctggaagtcgaactgaaccgaatccccggcgtggtggaaaacggcctgttcacccgcgaggcggtgggcatggtggtgggctgttttgacggcacgtcctacgtacagatgcgctgatttcccgatttgtctggagctataccgcacgacgcgtgaagaaaggaaagacgtactcaaccaacaataataagtcggagtcacttccatgaaaaaagtcgatttttcgagcgtgagccgccgcagtgtcctggctggcggtgtggtactggggttgggttcgctgctggggcgcacggccatggcgcagaccccgctgtcggtggcctactcgaacaagagcctggattactacttcttcgtgatccaggaagagtcggtcaagcgtgcggtgctggcgcaggccggcaagttccaggcgaccaacgccagcttcgacaccaccacccagcttggccaatggcagagcctgatgctgtcccagccgtcggcgatcatctccgaccccatcgacagccaggccatcgtttcggcgatcaagcgctacaaccagcgcaagattccggtgggtatcatcgacaccccggccgacggcggcgacgtggcgatcaccgtgagcttcgacaacttcaagggcggcgtgatggccgctgaagaaatcgtcaaacggctggtggccaaatacggcagcccaaaaggcacggtgctcaactgcttcggcgccctggcctcggtggcgtggcgcctgcgcaaggagggcatggattcggtatttgccaaataccccgagatcaaatacctcgcacggcctaccgaaggccagttggacaagatgcagtcggtcacactctccaccctttcggaattccctgacctggacgccgtgcacgcgccgtcggattcgccgtcacgcggtatcgccgccgcgctgaagcagaaagaccgctggaaaaaagtcggcgaaaaaggccacgtcatcttcatcaatatcgacggcgaacccgtggcgctggactggatcaaggacggctacatggacggctgcgtgtcccaggacccggttgcctacggccagatcgccgtggaaatgatcaccaagtacgccctcaacggccaggccgtgccgctgggtacctaccagaacaaggattacttctgggaaaccggcgagatcgtgcagggcaagaccggcccggcgctggtgataccggcgttcatgatcactcctgaaaacgccgacgataaacgccactggggctatgtcgcggagaaggtctggggcgtggcttccaagtgatggtccgtcgcgcagcgtgaataacggctggcgcgatgtttatccgacaaggtgatggtgagaacaacaaaatgaccttacacccaacgcccgacgacacgatcctgagcatcgagaatgtcgccaaaagctatggcccggtccgcgccttgcgcggggtgagcacgcaaatccgtcgcggctcgatccacgggctgctgggggaaaacggtgcgggcaaatccacgctggtggggattatttccgggcaggtcatccccacctccgggcagatcctcatgaacgggcagccgctcaagcaggtggacgtcaaggtgatggagcaggccggggtgttcctggtgacccaggagccgatgatcatcggcaacctcaccgccgcggaaaacctgatgctcggtatctggccgacgcgcaatggcctcgtcgactggaaacagttgaacgcggacgcggcgcgcatgctcgacggttccggcatcgaccccaaggcgctcgccgggcaactcgacgccgtggcgcggcgcaagctgaacatcctgcgggcgatgttttccgggggcaaggtgatcatcctcgatgagccaaccgcgtcactgaccgtggtcgaccggcgccagttgttcgacttcatgctgcgcctgaaaggcgagggcgtgaccttcatcttcatttcccactacaacgacgagatcctcgaaatctgcgacgcggtcaccgtgctgcgcgacggcgccctggcgggtacgcgttcggacatcaccgggctgacctccgagcagctcaccgagctggtgatcggccacggcgtgcagctgttccagcgcaagcgccgcgaccacagcggcaaggcgccggcgatttccctgcgcggtgtgcgtggcaagtggctggcgctcgacagcctggacatcgcaccgggcgaggtggtcggttttaccgggttgcccggtgccggcgcgaaggaaatggcccgggcgatcttcggcctgcacccggccatcggcaccttgtcgatgaatggtgcaggcgtgcagccattgccacgttcgccgaatgcggcgttcgaggcgggcattgcctatctgtctgatgaccgccgcaaggacggcgccgtggggcagatgtcgattggcagcaacatcgccatgtcgtccctcgccacacgcagcaaattgggctttatcgacgccgatgcagaggcgtcggtgatcaatcactacttcgcggcgatgggcgtgaaatcgcccaatccggattactcggtgaacaccctcagcggcggcaaccagcaaaaggtctgcctgggccgggtgctggcgactcagccgcggctgttgatggtggacgagccgacccggggcatcgacatgggcgtgaagcaggacgtgttgcgcatcatcgacgagctcagcgatgccggcgtggcggtgatcatcgtgtccagtgacaccgatgaactggtgcgcgcggtggaccgggtgtgcatcttcgatcagggcacgatcaaggaaacattgaccggagaggacatctgcgtcgagcgcatccgcgcatccgtacaaggatccagccgttgaataagaaaaagagtggagacacgggtatgaatactttagtgaagcccggcaacggggtagcgcctgccgcaaccacaatcaacggcccggccgtgctgggctgggtgctgcacaacgtggtgtggatctggctgatcgcgctggtggcaggcttcggcctgttcaacgaattcttcttcaccctgttcaacctgcagaacgtgatggtgcaagccacggtgctcggcatgttggggctggcggtggcgctgccgttgctggtggcggagatcgacttgtcgatcccggccaacgccgggttttcctcggcggtgggtgcgctggcttattcgagctggggtttgccgtggtacctggcggtgatcatcggcttgctggtgggcaccgcgatcggcttcttcaacgggctgtgcatcacccggctgaaaatggtctcgctgatcgaaaccctggcgatgatgatcatcctgcaaggtgcgttgctggcgctgacccagggcaccacgctgaccaacatggccgacggctatatctggatcggccaggtcacgattgatggctggccgctgatgccggtggtgtttctgctcgcgctggtggtgatgggcgtggtgctgcgccgcacggtgctgggccgctcgatctatgcggtgggcggcaacccgattgcgtcgaactcggcgggtatccgcgtggaccgggtgaagatcatcacctacaccatttccggttttctcgcggcggcggcgggctttctgctggcgtcctggcagatggcgattacctccagccagggttccagctacctgctgtatgcgattgcggcgccgattatcgggggcgtcagtgtgtttggcgggcgcggtaacgtgaaaggcgtactcggcggcgtattgttgctgacagtgatccaggtcggcttggcgattgtgaatgtgccgtcgttttatgtcggcatgatcggcggcgtgatgatctttatcgccgtggccatcgacgccattcgcgtgcgctatttcggttaaaccatttcaacttcgggaaacgcccatgtcttttacaccccacggcaagcacctgatcgcaggcgtttgggtcgccggcgatagcaccttttccaatgctccgactcaaggcccggcccaatcattttcggcaggcagcatcgagctggtgaaccgcgcctgcgaagcggcggaagcggctttctggagctttggttattcgagccgcgaggcgcgtgccgaattgttgaatgccatcgccgatgaaatcgaagcgcgggcggcgatcatcaccaccgtcggttcgctggaaaccggcctcccggaagggcgcctgcaaggtgagcgcgggcgcactgtggggcagttgcgtttgtttgcgtcgcatatcctcgcgggggactacctcgaccgtcgccacgatgtgccgttgcccgatcgccagccgctgccgcgcccggacattcgcctgatccagcgcccgatcgggccggtggcggtgtttggtgcgtcgaactttccgctggcgttttccacggcgggtggtgacgtggcctcggcactggctgcgggttgcccggtggtggtgaaggggcatgaggcgcaccctggcaccagcgagattgtggccgaggcgattcatgcggcgatcaaaaagtgcgacgtgcaccccggcgtgttcagcctggtgcacggcggttcgcgggcggtggggcaacggctggtgcagcatccgctgatcaaggcggtgggtttcaccggttcgttgggcgcgggcagggcgctgtttgatctgtgcgcgaagcggtttgagccgattccgtttttcggtgagttgggctcggtgaacccgatgttcctgatgccccatgcggtagcggcgcgggggctggagattgccaagggttgggccggttcattgacgatgggcgcggggcagttctgcaccaaccccggtgtggccgtgctggttgaaggcgaagcggccaatgcgtttatcgaggcggcggtcagcgcgttggcgccggttggcgcccaggtgatgctgaccgaaggcattgcccatgcctatcgcgatggccgtgaacgcgtggcgaatgccgtgggtgtgcgtgaagtgctgtccaacacctgcgagccgcgccaggccatgccgtatctgttcgccaccacgggccgcgaatggctggccaatgcttcgttgggccatgaagtgttcgggcctttggggttggtggtgacagtgaaggatggcgacgaattgctggaggtcgcgcggtcgctggaagggcaactcacgtgcacggttcatatggatgcagaggacagcgccgaggtcagccgcttgctgccgattctggagcgcaaggccgggcgtatcctcgccaatggcttcccgaccggtgtggaagtgagcgaggccatggtgcatggcgggccgtatccggcgtcgaccaacttcggcgctacctcggtcggcaccatggccatccgccggttcctgcgtccggtgagctaccagaacatccccgaggcgttgttacccgaggacctgcaacaacagtaaatcaatgtgggagctggcttgcctgtgatggcggtagagcaggcagcccctctactgacagtgctgccgtcttcgcaggcaagccagctcccacattggatcttcattgctggcgataaagcgcccggcaagatgatcctgctgatagcggtcttcccaacacagcaagtctcctgtgggagctggcttgcctgcgatggcggtgggtcaggcaaccctctatcgactgtgctgccgtcttcgcaggcaagccagctcccacattggatcttcattgctggcgataaagcgcccggcaagctggccctgctgatagagatcttcccaacaccgcaagccccctgtgggagctgtcgagctttagcgaggctgcgaaggcggcctgcggggcgccttcaatctggcttagtgcccatggctgcggcctacgtgggaatgctcggcctcgctggcctgcacgctgccactgacttccaggcgctgcaaaattccgcattgatccccgccgccgcaacgctggcgcaggtcgagtaactgttcctgcaaggccagtaacccgtcgatccgcgccttgacgtggtggatatgctcgtcaatcaacgcattcacgctttcgcactggtcctgcgggctgtcgcgcaaccccagcaggctgcggatttcttcgagggtcatgtccaggctgcggcagttgcggataaagatcagccgctcggtgtgcgcctgggtgtacacgcggtagttggcgtcggtgcgggccgggggtggcagcaggccttctttctcgtaataccggatggtttccacctgacagtcggtcagtttggccaattcgccgatcttcatcgcagcaatctccaaatgggtgcttgaccctatagtggctacagggtctttacttggcaacaggcacctttacggacgcgacagaatgagcgattccctccacaccccgcataagcacgatcatgaccatgaccatgaccacgatcatgccccgaagaaactcacgcctgtgcatgaccacggtcacggcggttcttgctgctccagcaaggtggcacctgccgtagtgacgctgagcgaggcgcccaccgccggctcgcgcctgagcaccttccgcatcgaagccatggactgccccaccgagcaaacgctgatccagaacaaactgggcaagctcgctggcgtgcagcagttggaattcaacctgatcaaccgcatcctcggcgtcacccacgacctgccgagcaccgcgccgatcgtcgacgcgattaaatccctcggcatgcaagccgatcccatcgaagaaggcacgcccgccgctgaaccaccggccaagaaacactggtggccgctggcggtgtccggcgtgggcgcgttgggcgccgaagtgctgcacttcaccagtgccgcaccgacctgggtaattgcactggttgcgctggtctcgatcctcagcggcggcctcaccacctacaaaaagggctggatcgccctgaaaaacctcaacctgaacatcaatgcgctgatgagcatcgccgttaccggtgctgtgctgattggtcagtggccggaagcagccatggtgatgttcctgtttaccgtggccgagctgatcgaagccaagtccctggaccgtgcgcgcaacgccatcagcggcctgatgcagatgacaccggaacaggccaccgtgcagcaagccgacggttcgtgggccgaacaggaagtcaaaagcatcgagcttggcgctatcgtgcgggtaaaacccggcgaacgcatcggcctggacggtgaagtcaccgccggccagtccaccatcgaccaggcgccgattaccggcgaaagcctgccgattgaaaagaccgtgggcgataaagtctttgcgggcaccatcaaccaggcgggttcgctggaatataaagtcaccgcagcggccaacaactcgacactggcgcggatcatccacgcggtggaacaagcccagggcgcgcgggcaccgacccagcgctttgtcgacagcttttcgaagatctacaccccggcggtgttcctgtttgccctcggcgtggcggtgattccgccgctgttcatggccggcgcgtggtttgactggatctaccgcgcgctggtgctgctggtggtcgcgtgcccttgcgcactggtgatttccaccccggtgaccatcgtcagcggcctcgcggcggcggcgcgcaaaggcatcctgatcaagggtggcgtgtacctggagggcggttacaagctcgactacctggccctcgacaagaccggcaccatcacccatggcaaaccggtgcaaaccgattacctggcgctgttcccgaacatcgaagacagcgcacctgccttggctgcgagtttggccgggcgttccgatcacccggtttctctcgccatcgccaacgcggctgtggataaaaacttgcccgcccacgttgtggataacttcgaggccctggccggtcgtggtgtgcgcggcgacatcaacggcgaaacctaccacttgggcaaccaccggctggtggaagatctcggcctgtgctcgccggccctggaagaaaaactcttcgccctggaaaaacaaggcaagtccgtggtgctgttgctcgacaagtccggcccgctggcgctgttcgccgtggccgacaccgtcaaggacagcagccgcgaagccatccagcaactgcacgaactgggcatcaaaaccctgatgctcaccggcgacaatacccacaccgcccaggcgattgcggctcaggttggcatcgaccaggcccaaggcgatctgctgcccaccgacaaactgcaagctatcgaaagcctctacggcaaaggccaccgcgtgggcatggtcggcgacggcatcaacgacgccccggccctggcccgcgccgaaatcggttttgccatggccgcagcgggcaccgacactgccatcgagaccgccgacgtggcgttgatggacgatgatttgcgcaagattccggctttcattcggctctcgcggcaaacgtcgagtatcctcaagcagaacatcgccctggcgctggtgatcaaggcgatcttcctggcagtcactttcctgggcatggccaccatgtggatggcggtgttcgccgacatgggcgtgagcctgttggtggtgttcaatggcctgcgcctgttgcgcaaataaacgatgagagggtggtgtgctgagtgccgagctgaaggctttttacatggtcgcccgcctgggcagcatcacccaggcggcgaaaaaactcggcctgagccagcccacggtcaccacccagattcgcaatctggaaagccagtacagcgttgagctgttctaccgcggcgggcgccgcctcaccgtcagcgacgacggggcgcggctgctgccgatggtcaagacgctgttgcagcaggaagccgacattgagttcttcctgcgcaacaccggccaggtccagggcgcattgcgcattgccgcgacagcgccgtattacatccttgatctggtcaaagccttccgcgaacgcctgcctcacgtggaggtgtcggtggaaatcggcaactcccagcaggtgctcgaagcgctggacgattaccgcgtagacgtcgccgcgtcctcgcaactgcttgaagacccgcgcttgatccgccgcgtgctcggcactgatccgctggtgctggccgtgcatcgcaaccacccgctggccaagctcgaccatgtgccgttaggtgccctggccgggcacacgttattgatgcgcgaagccggctccaccacacggcggctgaccgaagacatgctgcagggcgcgggcgtcagctacggcccgctgctggaaatcggcagccgcgaatcgatccgcgaggcggtgctgcgcaatatcggcatcagcatcattgcgcgccaggaagtgccacatgacccgcaactgcgagtgctgactatcgagaatgcgccgcagattccggaatacctgtattgcctcaaggaaagaaaaggcgcgcggctgccagcggcatttctggggctggcgcaggaaatgtcgccgatctgaaccttgcttatcgttgccgggccagcgagaaactcagtatcgcccccacggcgaggcaaaacgctatgcacaggcttgagataacaaacgcctcactgatcaccgctgcatccttgcttgcacccagcacggtgtaaaacaccccgccgatcagcgcaacactgagcgatgtgctgatctgcagggctgaactggcgatgcccgcgatcatgcccgaataccccgcagcgacgcggcctgtgatcatgcgcatcaacgtcggcagcgcgagcccttgccccaggccaatcacgaacaggacagtgcccagtgccaggggcggcgggctgatgccggccggtgtgttcaggataatgccggccagggcgagcaacgcgacggtttccaggcccatgccgatggcattcacatactcgccgagcaagcgcctggcggcaggcgtcgacaacggcccgagcaacaggcctgcgccaaatggcagaaataccagcccggcatcgagggcactgacgtgcagcgccgcttgcaagtaaatcgagaacagcaggaagaacacaccgatcgaatacagcatcagcgccaccagcagcgcacggcccaggcccggcgcgcgcaatgcggcaggattgaggagcggcgcgccacccgtcgcggccagtcgcgattcataccgccagaagcacaccagcagcagcggcaccgcgctcagcgaaagccaggaccacaggggccagccagcctcgcgaccttcaatcagtggcacgatcagcgcacccagcgtcaacatggacagcgccatgccacccaggtccagcttgctggcgtgttgtgcgcgcaggtctttgagcagggggacgcccagcaacagcaccagcagcgccaccggcaggttgaccagaaagatcgcccgccagcccagccccatgacgttctgcgaaatcaggatgccaccgagcgcctggccgaccactgccgccagcccaaacaccgccccgtacaggctgagggcgagcggtttttcggactcccggaaaatcacctgtatggccgccagtgcctgcggcgccatgaccgccgctgtaatgccttgtaatgctcgcccaacgatcagcgcccatggcgaccacgcgagaccgcacaacgtcgacgcggcggcaaagccgatcagcccgagcagaaacatgcggccccgcccatacaaatcgcccagccggccaccggtaatcagcgtcaccgcatacagcgcggcgtacgaggaaatcaccagttgttccgccgaggccgtggcacctaattccgcctggatggagggcaatgcgacattgacgatgaaaaaatccagcggtggcaaaaaggcccccaccagcagcaccgcgaacatcgcccagcgacgtacgtcgagtgaaacaaccgcaacttcagacatggaacactccctgcgcaaccggttggttgcgcgtcagacaggtttttgaaagctacaaaaatgaacgccgaagatgcacaaatgacagttccgccccggcccgatgccccgcagactggtttctccaccggccattcaggccggttattcccccgttgtgaggactgaccgatgaaccttgaaaccctggttgcccgccttgatgccctggaaagccgcgcggcgatcgagtcgttgatttccggttatgccaacgcgtttgaccggatggacaccgagcttttgcacagcctctggcacgcggatgcaaccctggacctgcccggcttcggcaagggcgaaaaccgcgaaggcatcctggcgatggctgcccgcaactggcgcaaaatgccccacatgcaccactggatggccaacccgctgatgcacatcgacggcgaccgagccaccgcaaccgtcgcagccgattgccttatgcatgacatcgaacaaggcccggtgcagctcagcggcctctatcacgatcagttcgaacgccgcgagggcgagtggcgctttagcgcacgcctgtttgaactgcatttcctcacccccctggaaaactggacgccgatcgccggttccgagcgcttcgccaggggttgagtccatggcgctattctgcgagcccggggcttgcgaggggactgccattgctgcatcttcgttgttcacttttgtacgagcacagccatggactggaatgacctgcgcgtctttctggcaattgcccgcagcggctcactgggtgcggcggccaagcagctcggggttagccaccccaccgtcggtcggcgtttgcaggcgctggaacaactcaatgggcaggtgtttttccggcgcaccagccaagggcttgtcctgacggctgccggtgagagcattctgtatctggcgcaggaaatggagcgcagcgccctggcaatcgagcggcgtatcgccgggcacagcgaccagcctgaaggcctgttgcgcatctcatcggcggactggttcgccagttatgtgctcgccccggtgctggacgcgttgcagcggcgcttcccgctgatcgtccccgaggtgatccccgggcaccggttgttcgacctgtcgcgacgcgatgcggacattgcctttcgcatcattccgttcagcgaacccgacatcgtgcagcgtcgactgacgacgatccgctacgggctttatatcgccgagcacctggatttcagcccgggctcggagggagaggggctcggtttaatcttgatgaacacggcgcaagcgcattatcccgatgtgctctggctgcaaaaacgttaccctcgcgcgaaaacccgcttcaccagcagcagccgcactgtgcaggcgcgcatgtgcgcgctggggctcggcgtggcggtgctgccgtgtgtgttgggcgatcagtcgccttcactcaaacggttggacgttggtgaagagctacccgggcgggatatttggatgggctatcaccaggatatgcggcagatggatcggctgcgggcccttgccgacctggcgtcagagatgattggcggcgacaaggcgggctgagtcctacacaaatccaccaataccactatcactcgcttttgccttcctgccacatcagggacgcattgcccgcctagcatggccttcatcagtttgatgaggtgcccagcatgaacacagccctgacccaccccggcgcgccgatgacggtgcgcggtatccagaagcgctttggcgccttcaccgcgctggacaacgtgtccctggacgtcgccgccggcgagctggtatgcctgcttggcccgtccggctgtggcaagaccaccttgctgcgctgcatcgctggcctggagcgccaggacagcggcgagctgcgcctgggcaaccgcgacgtgtccctgctgccgccgcaggcgcgggactacggcattctgttccagtcctacgcgctgtttcccaacctcaccgtcgaagcgaatatcggctacggcctcaccggcagcggtcgcgatgaagtgcgcaagcgtgtcgggcagatgctcgagctggtggggctggtgggcagcgaaaagaaataccccggccagctctcgggcggtcagcaacagcgtgtcgctctggcccgagccttggcgccggcgccttcattgttgctgctggacgagccgatgtcggccctcgacgcccgcgtgcgtgagcatttgtgtaccgagctgcgtcaattgcagcgccgcctgggcatcaccacgctgatggtcacccacaaccaggacgaggccatgttgatggccgaccgcattgccgtgatgaacaacggcaaggttgagcagtacgccacaccgcaggaaatctacgaccgcccggccacgccgtttgtggcggagtttgttggccagggcaactggctgcccttcagccgtaacagcgccagccatgcccaggtcggcgggatgaatatgcgactggccgaggatgctggtgtggccaagtccgggcgcctgttctgccgcccggaagcgatcagcgtcaacccgccggtgcatgaagagaacctgttcccggccaaggttcgcgagatcacttttctgggcaaccgctgccgcatgagctttgagctggaacaactgccgggccatccactgctggctgaactggccccggaagccatgccgcgcctgggtgcgcaggacatctgggtggccttgccgccgcgcagcctgcaggtgtttgcctgagatggccactgtcatgacgctgccacgacaggtgtcccgtgccgaaaccggtgaccgtattttcgtggtcggcggcaaactgctgtggctggtgttgctgggcgtcgccgtgttgatgccgttgctggcgatcttctggcgcggtttcagcagtgaagccgggcaaggcggtggcctggtcgccgcgcgggaattggtcaccagcgacaacttccactggttgctgggcaatagcctgaaagtctccctcagcgtcgcggccatcgtcgtaccgctggcgtacctgtttgcctacgccttgcaacgcacgttgattcccggcaaagcgatctggcgtggcctgtcgctgttgcccttgatggcgccgtcgatgctgccgggcattgcgctggtctacctgttcggcaaccagggcctgttgcgcggcctgctctcggacaatatctacggcttctgggggattgtgctgggtgaggtgatctacaccttcccacacgccttgatgattctgctgtcggcgctgtccctggcggatgcgcggctgtttgatgcggcgtcgagcatgggcgccagcccggcccgggcgtttcgcagcatcacttggccggccacgcgtcaggcggtgttcgcggcgttctgcctggtgtttaccctgaccattaccgatttcggcgtgcccgttgtcgtcggcggggactatcaggtactggcgctggaagcctacaaggcggttgttggccagcaacaatttggtcgcggcgccttgatcggcatggtgctgttgttaccggcgctgttcagcttcggcgtggatgcgtggttgcgccgtcgtcatggcgactccatgagcggccgtgcccaagtgttccagcccgcgccgtcgcggctgcgcgacggttgctacctggcgatcgtgctgctgatttgcgccgtgttgctgctggtgttcggcatggcggtgtattcgtcgctggtcaaattctggccgtacaacctgtcgctgtccctcagccattaccagttcgaagacacggcgggcggcggttggctggcctaccgcaacagcctgaccatggcgctgtgcacggcgctggtcggcagcgtgctgatcttcaccggcgcgtacctgatggaaaaaaccaagggccagaagggcctcaacctcgcgctacgcatgttcagcttcgtaccgatggccgtgccgggtctggtgctgggcttgggctacgtgttctttttcaacctcaacggcaacccgctgcatgtgttctacgggaccatgaccctgctggtggtgtgcaccattgcgcactacctgaccaccgcacagatgactgccaccacggcgttgcgccagctggacagtgaatttgaagccgccgcgctgtccctcaaggcgccgctgtaccgccattatctgcgcgtgacggtgccgatctgcctgccggcgctgctggacatcgtgcgctacctgttcgtctcggcaatgaccaccgtgtccgctgcgatcttcctctacagccccgacaccatcctcgccgccgtcgccgtgctgaacatggacgacgccggcaatgtgggcggcgcggcggccatgtccaccctgattctgttcacctcggccggcgtttcgctgctgctggcgtgggcctcacgtggcgcgttgcgccgctcccaagcctggcgccagaccgcgcccggccaataatcgtccctgtaggaggtgttccatgttcaagcccctggcgctggtcgctgcggtactcactgcattcagcctgaatgccttcgccaagaccgagctgaccgtgtacacggccctcgaagccgagcagttgaaaacctacaaacaggctttcgaaaaagccaacccggacgttgagatcaagtgggtgcgcgactccaccggcatcatcactgccaagctgctcgctgaaaaagaccgcccgcaagccgacgtggtctggggcctcgccgcgtccagcctggcgatcctcgaccagcaaggcatgctcgacaactatgcgccgaaggacctggacaagatcggcaagaactaccgcgacgccgccaacccgccagcctgggttggcatggacgtgtgggccgcgaccatctgcttcaacaccgtcgaagccgagaagcagggcctgaccaaaccagtgagctggcaagacctgaccaagcctgaatacaagggcaagatcgtaatgcccaacccggcgtcgtccggcaccggtttccttgatgtgagcgcctggctgcaaaccttcggcgagaagcagggctggcagtacatggacgacctgcaccagaacatcggccagtacgttcactccggctccaagccttgcaagctggcggcgtcgggtgaattcccgatcggcatttccttcgaatacccggctgtgcagttgaagcgccagggcgcgccgctggacatcatcctgccgaaagaaggcctgggttgggacatcgaagcgacggcggtgatcaagggcaccgcccacgccgacgcggcgaaaaagctcgctgacttctctgccagccccgctgcaatggagctgtacaaagacaatttcgccgtcctcgcccagccgggtattgccaagccgcagaccgaattgccggctgactacgagcagcgcctgatcaagaacgactttgcctgggcgtcgaagaaccgcgacagcatcctgaccgagtggcgcaagcgctatgacggcaagtcggagaaggtggccggtcagtaaggtttttatcagggttgatggcctcatcgcaggcaagccagctcccacaagggaatgcattccaaccaggcaaaccagctcccacaggggaatgcattccaaatgtgggagctggcttgcctgcgatagcggcctcgaattcaggacatcacgacatgacacaccacagcgatctgctgatcgtaggcgccggcatcctcggcctctcgcacgcttttgcggccgccaaacgcggcctcaaggtcaaggtcttcgagcgcagcgccacgccgctcggcgcttcggtgcgcaacttcggccaggcgctggtcaccggccaaccgccggggccgatgcttgatctggcgcgcgaaagccgcgaaatctggggccactgggcgcaagccgccgggttgcaactcaagcgcaatggctcttacctgtttgcccgcaccgaagccgaagaacacttgctggaagccttctgcgccggccgcgcgcaggaatacggctacaacgtcgaactgctgcaaggcgcggccatgaaggatctgtacggcggccaattccgtcatcatcgtgcggcgctgcacggcaaggatgaccagcagctgtattcgcgcgaggcgatccccgcgttgatcaactacctggcgcaagcattgaacgtggagttttacttctccacgctggtgcgcgacgtcgaaccgggccaattgcacagcacggccggcagctttcgcggcgagcagatcatcgtctgctccggccacgactaccaaaccttgctggcgggcgcgatggccgagctcaacccgagcatctgccgcctgcaaatgttgcgtgcgcggccagcggtgaatctgaacctgcaacacgcgttgctcaccggcctcagttgcgtgcattacggcgccttcgccgacctgccggacgccgcgccggtgcaggcgcagatcctgcgcgaagcgccgcacctgcacgaacacggcattcatttgctgatcagccccacgccccatggcgaactgatcatcggcgattcccacgactacggcagcgatgcctcgcccttcaatgccgagcaggttgatgactggatgatcgaactggccgagcagacgctgggctgcaagatccaggtggtggagcgctggcagggcgtttatggctcgcgcgggccggggccgttttcgttcctgcgcgctgcgcccggtgtgagtgcggcgttgatgcacaccggcgtcggcatgagcgtggggccggcgatggccgagcgaaatatcacaacactgtggggagaggcgcgatgaacccggaacaggcagtcgccgacgtcttcggcttgtatgaacagcacggcaaggccgactacattggcgagccggtgtcgcagatcgagcatatgtcccaggccgcgcagctggcgatggccgaaggctttgacgatgaagtggtgctggcggcgtttttccacgacatcgggcacatctgcggccagggcggcgagaacatgggcggttatggcgtggtcagccacgagcggctgggcgccgattacctgcgccgcgcaggcttcagcgagcgcatggccaagctggtggaatatcacgtccaagccaaacgctatctgaccttcagccaacccgactactacgcgcgcctgagcgaagccagccgccgtaccttgggttatcagggcggcgtgatgagtgccgaggaagcccgcgcgtttgaacaggacccgctgtgtgccgtgagtttgcgcatgcgccactgggacgagcaggccaaggaaatgcacgtgccggtgctcgaccttgaagtgctcaaggccaaggcacgccaactactgacggcttaggcgtcgtccaggcgttgggccagggcttcgacctgttcctggcgttcggcctgactcagcttggcgtgaggattgagagacgaccactgcggatgggcgcgggctttgtgcagcgcgtccggcaatttgccttcgcgccaggttttgtcctgaggcgtgtcgaccttgatgctgtgcagcgccgcgtggccgcgcaggttcaaggccttgagcagttggcgctggcgcagggcgagcaggcgcagcacgctgtcgtccaccgtcaactcgcgctggcccttgatcttgcccagcaggcggctgccgtaactgcgggcggtttgcagtgcgccgccggcgattgcgccagcgatggcagccgcgcccaaggtcaggccgccgaccagcaggtccacaccggccccggcggccgcacctgcggcgatcccgccaccgacgcgcacgccaagttgtttgagggtttcggggttgaacaggtcatcgccccagcgcccgtcgagcaacggcaagtcgctggcggcggcgtcctgtgggcggaagccgaagagtttgagcaacgcttccacgcatttctgctcgcgctggcgtacggctttgcgcaggtcgccgatggcttgttgctcgtcttcggtgactacgctgcggcgacaggcggcgcagtcgagcagcagttcggcgatcaaccgcgcggcgctttgctggcgggcctggcgctgggcttcctgatcgaggatcaaccgttccaactgcgggcgcgcgttttccagcagcagggcgaggctttcatacaggcgccgttcgccgtcttccggtggggcaacactgtcgaaacgcaccagcgcgtgcaggccgaggcgtgcgagggcttcgcgccagtccggctcgcggtggtcgttgctgctgacgaaattgagcaccggcagcaacggcttgccacagctggcgagcacttgcagctcgtcgcgatatttggccagcacgggctcgcgggcatcgatcacgtagaggccggcgtcggaagccagcagttggcgcagcactttggcttcctgttcgaaacgctggcgggcttcgctgccttcgaggaagcgtgcgaggcgtgccgggccgtcaaggcgttcgccgggtcgatccagacgttccagatagtcgaggagcgcgatggcgtcctccagaccgggcgtgtcgtacagctccagcaaggcttcgccgtccaccgataaccgcgcgccttccacatgccgcgtggtgctggggcgatgggagacttcgccgaagcccacgtcgcgggtgagcgtgcgtaacagtgaggttttgccgacgttggtgtggccgaccacggcgagtttcagcggtttagtcatgaccggtctccagccagttcagcggcgcgcagtcggcgaacggcagctccagctgttgcagtgcagtgtgccagtcgcccaggcgttcggcatcgagcgcctggccgggcggcgcttgcagcagccacacgcgggtggcggtggcgctgcgcgccagctcggcgatcagcgccaggctgccacggtccggcgagcggcgtgggtcgcaggcgatggccaggcgtgcgggcggaaagcgcgtgagttgttccagcagtttgttgcgcgattcgcggctgtcgaggacgccggcgtttttgacgctggccggcagtttgggcggccatgggtgctggtcgtccagttcgatggcgaccagcagggcgccgtcactttccagttcgctgacgccgccggtcacggggtgcagctgttcgggcgcggcatcgttgacgccaaggcgctcgctgcttggcatcaaacgctcgcgcagttgactgtagccgggcaagttcaggtccagatgcagcgccgcgcgcccgcgtttccagcgccacaggcacagcagggcgaggatcaaccgtggcagcaggccgtagaccagcagcacgcctaccagccaggcggcccaggcctggcgcgcgctttcgatattcagggcggaatcgccgctggcgcggatcatgtcgaccgtcggcacattgaagcccagcaaggcgggcagcgtgccgagggcttgagtcacggcgacgaacgtgtcagcgccgaggatggtggtttcccacacaaaaccgtagcgtcgggtggcgagcagcgtaagcaaaatcaccatggcgctgagcaaggccagcagccacaggctgttgaccagcacgccgacggcccagcggttgagtttctgacgctgcaacaacagcaacagcgcgggcgccaactgagcggccttggcgtcacgggcgaacttttcgctgagccacagccacagtcgcccgaggctggcgctgtgttccccggcaaacagtaggcccagcgcccaactgatcagcaggatcaggttcaagcccagcaggctgcccagcgcccagaacacgttgactggcgccaggccgttgcccagggcggcaaaggccagcccggcgccgctgaccaccgcgacgatcgccagcaataccagcgccaggcgcgcgccttgcagccagcgggtgagggcggcggtcaggccgtcgcgctcggccaggtgcagggcgcggtgctggatgcgcgtcggcaagtcgccaccggccgtgcgggccaggcggttggcttccaggtcttccaggttgccagcgtgctcttcacgcaggcgcacggtttcggtcagccaaagcttttgcagcgggttcagtgcagtcacgcgccatcctgttgagcaagtgaggtctgagcataaccgctgactcgcggctctggtattctcgtcgccatgaaaaaaactctccctttaagcctgatcgcagccctcggtgaaaaccgtgtgatcggcgtcgacaacagcatgccctggcatttgccgggggatttcaaatatttcaaggccaccacgctcggcaagccgatcatcatggggcgcaagacctgggattccctgggccgaccgttgccggggcgcttgaacctggtggttagccgtcagaccgatttggcgcttgaaggtgcggaagtttttccgtcgctggaggctgccgtggaacgcgctgaggcgtgggcgctggagcagggcgcggatgagctgatgctgatcggcggcgcgcagttgtatgcgcaggggctgggacaggcggatcgcctgtatttgacgcgggtggcgttgagcccggaaggggatgcgtggtttccggcgtttgatttgggccagtggaagctagtgtcgaacctggagaacccggcggaaggcgacaagcctgcgtacaactttgaggtttgggaaaaggcctaagagcatcgcaggcaagccagctcccacacttgaatgtattcacacatcaaaatgtgggagcgggcttgcccgcgatagcggtctatcaggcctgcgccaactcggcatgctcatcggcattcaacagctctttgtctgtctgccccatcacttggctggtaatcgcccccgccgtcatcgaaccattcacgttcaacgccgtgcgtcccatatcaatcagcggctccaccgaaatcagcagcgccaccagtgacaccggcaagcccatggccggcagcacgatcagcgcggcaaaggttgcaccgccgcccacacccgccacacccgccgaactcaaggtcacaatcgccaccagcgtggcgatccacagcgggtccagcgggttgatgccgacagtcggtgcaaccatcaccgccagcatggccgggtagagaccggcgcaaccgttctggccaatcgtcgcgccaaacgaggcggcgaaaccggcgatggattgcgggatgcccaggcggcgggtctgcgcctcaatgctcagcgggatcgccgccgcgctggagcggctggtgaaggcaaaggtcagcaccggccacaccttgcggaagaagcgcagcgggttgatcccggccagcgacagcagtaggccgtgcaccacgaacatcaggcccagcgccaggtacgacaccaccacaaaactgccaagcttgatgatgtcttgcaggttggaaccagcgactaccttggtcatcagcgccaaaacgccgtaaggggtcagcttcatcaccaggcgcaccaggcgcatgacccaggcttgcagggtgtcgatggcgttgagcactttctggcctttttccacgtcgtccttgagcagttgcagcgcggcaaccccgaggaaggcggcgaaaatcaccacgctgatgatcgacgttggcttggcccgcgccaggtcggcaaacgggttggccggcacaaacgacagcagcagttgcgggatattcaggtcggccaccttgcccgcgtaatcactctggatcacttgcaggcgcgccatttcctgggtgccggccaccaggccttcggcggtgaggccgaacaggttggtcaggccgatgccgatcaacgccgcaatcgccgtggtgaacagcagcgtaccgatggtcaggaagctgatcttgcccagggacgaagcgttgtgcagacgcgccacggcgctgaggatcgaggcgaacaccagcgggatcacgatcatttgcagcagttgtacatagccgttgcccaccagatcaaaccagccgatggaggccttgagcaccgggttgccgtcgccgtagatcgtgtgcagcacggtgccgaacaccacgccgaggacgagtgcgaacaggaccttcttggcgaggctccagtttgtgcggcgggtttgtgccaggcccagcaacagggccacgaataccaatacgttgagaatcagaggcagattcattgaagctccgttgagagtgcagccaaccgcgtgagcctgcgattgcgaaccggaaagcctaacagcttgaaatatattgatttaataccgatatggaatggtggctgtcgtttttggaataagccgttgacgctcacgcgcatggcgttggcgcaatcacgacgcaggcggtcgcgctcgggtgataactgtcatacggatttgttagcgtcgatgtctttcactcagggagaaatcgcttatgaagctcgcgccgaaattgcttgccgccgccttctgccttggcttcgtcagccaagcctttgccgccaccgagttgaagcactggccggcgcctgccgccaagcaactgaacgaaatgatcgccgccaacgccaacaagggtaacttcgcggtcttcgacatggacaacaccagctaccgctacgaccttgaagagtccttgttgccttacctggaaaacaagggcttgatcacccgcgacaccatggacccatcgctcaagctgatcccgttcaaagacacggccgaccacaaggaaagcctgttcagctactactaccgcctttgcgaagtcgacgacatggtttgctacccgtgggtggcgcagattttttccggcttcaccctcaaggaactcaagggttacgtggatgagctgatggcgtccggcaagccggtgcccgtgacctattacgaaggcgacgtggtgaaaacctctgaggtgcagccaccgaaagtcttcaccggccaggccgagctgtacaacaagctgatggaaaacggtatcgaggtgtacgtgatgaccgccgcgtccgaggaactggtgcgcatggtcgcggcggatccgaagtacggttacaacgtcaaacccgagaacgtcatcggcgtaagcacgctgctcaaggatcgcaagaccggcgagttgaccaccgcgcgtaaacagatcgcggccggcaagtatgacgagaaggccaatctcggcctggaactgaccccttacctgtggaccccggcgacctggatggctggcaaacacgcggcgatcctgacctacatcgacgaatggaaaaaaccggtgatcgtgggtggcgacaccccaagcagcgacggctacatgctgttccacgatgtggacgtggccaagggcggcattcacttgtgggtcaaccgcaaagacaaatacatgacccagctgaacggcatgatggccaagcatgctgcggcgcaggccaaggaagggttgccggtgacggcggacaagaactgggtgatcgtgaagccggacgaaatccagtaagaccgaggcgccttcatcgcaggcaagccagctcccacattttggccgcattctcctgtcggaactcggtcaacggtgggagctggcttgcctgcgatagcgatctcaagaacaccacagccctcacggcaaaaatagatatcaattgcgaaccaatctcatcctctgctagcgtgcgcacctcctgaacccctcgttcttctcaaggtagtgctgtgccctcctggaattcacagatcgcgcgcctgttcgcggagcagaagaaagctctcgaagcctttgtcacccgccgcaccggcagtgcccaggtggctgccgacctgacccaggaatcattcctgcgcttggcgcggctggattccggcgagaggatcgacaacctcccggctttcctcttcaccattgccagcaacctggtgcgcgatcaccagcgccaggccattcgccgcgagcgcctggacgccggtgaacccagcgaagaactgccgtgcagcaacccgggcgccgatgagcaattggccgcctaccagcaggaacaactgatgcaggacgcgattctggcgttgcccgaagcgacccggcagatcttcctgctttatcatgtcgacgaactttcctaccgcgagatcggcgaacgcctgtcgatcagcccgcgcagtgtggaataccaactgcgtcgtgccttgatcgaatgccgcgcttacatcaaaacgcggctcgccagcgacacacaaggacgtcggtcatgactgccccttccaccgccgacgatagttttgaacaagcatccgcctggtatttccgcctgcaggccgaggacgtgaccccggctgaaatgcaggcttttgccgcctggctggggcaaggcccggccgaggatgcagcctggcaggaagtgcaggcgatgctcggtggcttgcgtgaacctgcacgggcggtccgccgcgccgaacaggccgcctggcgcaaacccgcgcgccgctgggcctgtgccgccgccgtgctgttggcggtggggctgaccgtgcaacacacaccgtggctcgaccgactgcgcgcggattacgccacccgtaccggcgaatcccgcacggtcgaactggccgacggctcgcagttacaactcaacaccgacagcgctgttcaggtgcgcatgagtgccggtgagcgtcaggttcgcctgttgcgcggtgaaggctttttcagcgtgacccaagacccggcgcggcctttcgtggtgcagtccggcgacggctgggtaaaagtcgtcggcacccagttcagcgtcgcgcggcgtgatgcacagacgcgcgtgcaagtggcgcacggcaaggtgcaggtcagcgccggcagcggtgagccggtgtacctggaaccggggcgtgcggtggaatatcaaggccagcgccttgccgatgcccacgggttcgacccggccagcggctttgcctggcgccagcggcaactggtgtttcgccagcaaccgctgtcggaggtggtcagcgagttgaaccgctactggcctggcacaaccctggtgttgggggatgcgttgcgcaatcgcgtggtgtcaggtgtgtttgaaatcgacaagctcgacgcggtgatcaaagcactggaatacaccctcaacctgcacgccgagcactacaccccgtatttgctggtgttgcgcgatggcaaggcctcctgaacgcaacttttttcaaaaactttcagggtttccccacaggccatcgtccttgatcactgaggcgcaaatagtaagcactctcaagtagtgcggcgccgatcaccgacttttttgcactggggagcaccactcatggcacaccgatttgccgcacagcccttgctggcgctggccattagcctggccggcggcactgcgccgttgtatttgcaggccgctgaaaccactcaggcgcagacctggcgcttcgatattcccgggcaaagcctggacggtgcgctggcggcgttttcggcagtgacgcgggtgcaggtgctggtgtcgggggagctgacgcaaggcgtggtgtcgccgggagtaagtggcaacctgggccagcgtgaagccttgggcgtgttgctggggggtacaggcttgagcgcggcgtttatcaatgcggataccgtcacgctggaaaaacgcgtcgcagcgggctcggcgctggaagtcggtgcgacgttggtcagtgcagaacacttgggcaccaccaccgagggcagcggctcctacaccacgggtgcggtgaccatcggcaagcgcccacaaaagctcaaggatattccccagtcggtcagcgtgctgacgcgcaaggccatggatgaccagaacatcaccaccctgacccaggcgatcgaagcggtgccgggcatggcgtcagttaaatccccggggccggggatgttcatgtttgcgcgtggtttcgagatcgaatcgctgcaatacgacggcgtaccggtgccgcgcaatgtgtatgcactgggcagctacatcaccgaaaacatggtgatctacgaccgcatggaagtgctgcgcggcgctgccggcctgctgcaaggcgccaacagccccggcggggcggtgaacctggtgcgcaaacgcccccaagcgacacccaccgtgactttgagtgccaaggccggcagctgggaccgttatgcctcccaggctgacgtgggcggcccgctgaacgacgccggaacgatccgtggccgcgcggtggtcaactacgagaaaggtcattctttcaccgactacgtgtggaactgggaacaaaccgtgtatggcgcgctggacttcgacctggacgacgacaccacgctgggcgtgggtttcagcaacaagaaaagccacgggcggccttacctgatcgcgttgccgcgccacaccgatggcagcccgctggatgtctcgcgctcgacctacaccggggcaacctggaaccgttcgttcaatgatcagacggcggtgtacctggaccttgagcatcgcttcaacgatcactggacattcaatgcctcggcgctggcgatgaatgaatccaacgaagccacttatcaattcatcgtgggtgccgtgccggtcggctctacacgcagcggcaactacgccgattactccaccgatttttccggcaagaaccgtggctttgacgcctacatcagcggcgatttcgaagccctgtcattcaagcaaagcctggtgttcggcggtaactattccaagtacaacactgacgatggctatgcccgcgcgtttacgcccggcgcggatattggcgccatcgaccatcaccgcccgcagccgtcctacaacagcatcgccgaccgcgccaacctggcgttgagcacgtatgacatcacccaaaaaggcctgtacggcacttggcggatcaatctcactgagccgctgaccttgattctcggagcgcgtaccagttggtatgactttgcgttcgatcaagacaactactttgcccgtgagtaccaggacggcggcgagaaaaactcggtcaagagcagcggcaaagtcacgccatttgccggcctggtgtacgcgctggatgaccagtggtcggtgtacggaagctacgccgaagtgtttatcccgcaaacccagttgacccagcagaagaccggcttgccgccgattgaggggcgcaactacgaggtaggtctcaagggcgagttgatggacgggcgcctgaatacctcgctggccctgttccgctacctccatgaaaaccgtgccgtcaccgacttcagcaccgacattgacggccccaacgcctgcaacggctggtactgctccacggcgtcgggcaaggtgcgcagccaggggctggaggctgaggtcagcggcgaagtggcgccggggctgcaggtcagcagcagctatacctacaacaccaccgtgtttttgaaggacaccgagctcaaaggcaaagtcttcagcacggcggtgcccaagcacatgttgcggatctggggtgattacaaactgccaggcgatttgagccgcatcagccttggggccggggtcaacgcgcaaaccgcaaccaccagctttgaccgtaactttggccaggccggatttgcgatcttcaattcacgggttgcttatgacgccagtgatgaagtgaccttggcggtgaacttcaacaatcttctcgacaagcgctactacattccgtcttacagccagctggtgggcaacaactacttcggtgacccgcgcaatatgatgttcagcgtgacctacaagccgcagttctaagccgtccccacacaaccacctgtggtaaccggtttgtgtgggagctggcttgcctgcgatggcggagtgtcaggcgatacatgtgttggctggtccaccgctatcgcaggcaagccagctcccacagtttgatcctcattgttgttggggttttggccaggcaaaaaaaagccccgcacttggcggggcatttttatgggcgaggcttacaggccgtcgagcatcgccttgttacgcacagcgcccttgtcggcactggtggccagcagggcgtaggctttcagcgcggtggtgactttgcgcggacgcttctccaccggtttccagcctttcttgtcctgctcaacccggcgtgccgctagttcctcgtcgctgatcaacaggttgatcgagcggttcggaatgtcgatcagcactttgtcgccatcctgcaccaggccaatcgcgccaccggctgcggcttccggcgaagcgtggccgatggacaggcccgaggtaccgccagagaaacggccgtcggtcagcaaggcgcaggctttgcccaggcctttggatttgaggtaggacgtcgggtagagcatctcctgcatacccgggccgcctttcgggccttcgtagcggatgatcacgatgtcgccttctttcacttcgtcggcgaggatgccgcgtacggcgctgtcctggctttcgaagatcttggcgttgccttcgaacacatggatggactcatccacaccggcggttttcaccacgcagccgtcgagggcaatgttgccgtacagcacggccaggccgccttcttgggagtaggcgtgttcgacgctgcggatgcagccgttttcacggtcgtcatccagtgttggatagcgggtcgactggctgaacgcggtttgcgtcggaatgcccgccgggccggccttgaagaacgtgtgcacggcttcgtcgtcagtctgggtgatgtcccacttggcgatgccttcggcgacggtcttgctgtgcacggtcggcaggtcggtgtgcagcaggccgccacgggccagggaacccaggatcgagaagatcccgccggcgcggtgcacgtcttccatgtggtacttctggatgttcggcgcgactttgcacagttgcggcacgtgacgggacaggcggtcgatgtcgcgcaggtcgaaatcgatctcggcttcctgggcggcggccagcaagtgcaggatggtgttggtggaaccgcccatggcgatgtccagcgtcatggcgttttcgaacgccttgaagttggcgatgttgcgcggcagcaccgactcatcgttgtcgtggtagtagcgtttgcacagctcgacgatggtgcggccagcctgcaggaacaattgctcacggtcgctgtgggtggccagggtggaaccgttacccggcaaggccaggcccagggcttcgaccaggcagttcatcgagttggcggtgaacatgccagagcacgaaccgcaggtcgggcaggcgctgcgctcgtattccgcgaccttctcgtcagaagcgctggaatcggcggcgatgaccatggcgtcgaccaggtcgaggccgtgggaggcgagcttggtcttgccggcttccatcgggccgccggagacgaagatgaccgggacgttcaggcgcagggcggccatcagcatgccgggggtgatcttgtcgcagttggaaatgcacacgatggcgtcggcgcagtgggcgttgaccatgtattccacggagtcggcgatgatctcgcggctcggcagggaatacagcatgccgtcatggcccatggcgatgccgtcatccacggcaatggtgttgaattctttggctacaccgccggcgcgttcgatttcgcgggcgaccaactggcccaggtccttgaggtggacgtggccgggtacgaattgggtgaacgagttggcaatcgcgatgatcggctttttgaagtcgtcatctttcatccccgtggcacgccacagtgcgcgcgcgccggccatgttgcggccgtgtgtggatgttttcgagcggtaatctggcatggagcactccgggcggctaatcaggtactaaaggtgagtgagcttctattgacgtctggaacactcagaaatggccgtgtgtccggaagttgccactcgcgtcgcgggatcgccgcttgcttgggcctcgagctcataaacccgccgggggatgactggcgatgaataggccgattctacaccgctggcggctggagggaatggccgccggtgtgaagataatgcttacaaggcgtgcggcggggcatcagcggctgacccgcgcattggtgacccagccccacaggctcaaaacgacgaaactgatggcgatggtcatcagcaaatggctgccagtctgcgccagggcggcgctgctgacggcggcggtgaggaacatgatgctgttgcctgccgatgccgccgtgcccgcgctgctggagaacagcagcatggctgcagatatcgcggcaggtcgaaccagcgttacggccagggcgctgatcagcatcgggatcagcagggtcacggtggtgatggtattgaaactgatgatcagcgttaacagcacgccggcaatgagcagcaagccgaggccgaggttgatctgccgggaaagcgagatgcgtttttgcaagtacgaggcggccacgccgccgagcaggtaggccacgccgtacaccatcagcaccatggcgtactggtattcggacagcttcaaggcatccatgaaaatcagcggtgtcacgctgatcagcgcaaagtaacaggcgaataccagtgcggcgatccaccagtagcgcagaaagtctcgatttcgtgcgacggctttgagcgtgccgaagatcgacacaggcgcccgatgcgggctggcggatttgggcggcagaatgtacagcgcatggagcagcatccccagcgccatcagcgcaaagccatagaagctgccttgccagtcgaaggtggtttgcagccaggacccgatcaacggtgacagcgccacaaacgatccgctcagggtcatgtaatagaggcgcacccgtgcccggtcttgttcgtcgaacaagtcttcgaccagtgcgtggccgagcacaaagaagccacagcccatggcctgcacgctgcgaaacagcaggaaggtcaggtagtccgccgccagtgcgcaaccgatagctccgaggatcgacagtgtgatgcagccgatcaggacttctttgcggccccacttatccgacagcgggccggcgatcagttgggatatcgagaaaaccagtgtgaacaggctgatggagagcgcgatatcggctgtaggcgtgtcgaaccgtgcggcgagggcgggaaaagacggcagcagaatattgatcggaaaaaagctgatcagggaaatgcaggtgatgaggatgaagcgggagaggtggggcccagacattgtttttattttccggagtcattccagaaacggatactagtctgcgaaaaatggaattcaatcaaaaatgttttgtgaactgtctccacttgcatggcttgcgggaatatttctgacacagcacaaatgaatgtgggagctggcttgcctgcgatagcggtgtatcagccaatgcataatcgactgatcctccgccatcgcaggcaagccagctcccacctttgggtagtgtgttacttagctattgggcaacaaccggcacgtaatgctcttgatgtaacgcgtttcggcaatcgccgggtgtaccgggtggtccgggccctggccgccgcgttcgagcatctggatattgcggtccaggtggcgggcgctggtcagcaggatgttttgcaggtcgtcttccggcaggtgcatggagcacgatgcgctgaccaggatgccgtctttgctgagcaggcgcatggcttgctcgttcaggcggcggtaggcgccttcgccgtttttcatgtcttttttgcgtttgatgaaggccggtgggtcggcgacgatcacgtcgaagcgttcttcgctggctttcagttctttcagggcttcgaagacgtcgccttcgatgcaggtcatcttctcggcaacgccgttcagcgccgcgttgcgctccacgccgtcgagggcgaaggcggaagcgtcgacgcagaacacttcactggcgccgaaggccgcggcttgcacgccccagccgccgatgtagctgtacaggtcgagcacgcgtttgcctttggcatacggggccaggcgtgcgcggttcatgcggtggtcgtagaaccagccggtcttctggccctggatcacgggggcttcgaatttcacaccgttttcttccagcgcaacccattccggcaccaggccgaatacggtttcgacgtagcggttgaggccttcggcgtcacgcgcggcggagtcgttcttgaacaggatgccgcttggcttgagcacttgggtcagtgcagcaatcacgtcttctttgtgcgcttccatggtcgccgaggcgatctgcaccacgaggatgtcgccgaaacggtcgaccaccaggcctggcaacaggtcggagtcgccgtagaccaggcggtagaacggcttgtcgaacaggcgatcacgcagggacagggccacattgatgcggtgcaccagcagcgacttgtccagcggcaatttgatgtcgcgcgatagcaggcgggcgcagatcaggttgttcgggctcatggccacgatgcccagggtcttgccgccggccgcttcgaggatggcctggtcgcctgcctgaaagccgtgaagtggggtggcggccacgtcgatttcgttgctgtagacccacaggtggccgttgcgcaaacgacgatcggcgttggctttgagacgcaggcttggcagggacatgacgtcgctccggaaaaaagagcgggagtatacctgttgcgcaccgattcatgtgggagctggcttgcctgcgatgcagacgactcggtgtatctgacgtacggtggtgatgccatcgcaggcaagccagctcccacatttgatcgggtgtcggctcaggtttttgaggtgtcggtcagcttcccatagagggtagaattcgcgcctagcccagagtgtgtacttatgtcccaagagctttctcccgaacagatccagcaggccctgcaaggcatcagcgtgccgccccaaccgcaaatcatggtggatttgcagatggagcaatacatgcccgacccggacctggaagtgatcgcgcggttgatcgcccaagacccaggcctgtcgggtgccttgctgaagatcgtcaactcgtcgtatttcggcctgagcaacaagattgcctcgatccagcgcgcagtgaacctgctgggcagccgttcgatcatcaacctgatcaacgcgctctcgatcaaaggcgagatgagcgatgacaccatcgtcaccctcaaccgtttctgggacaccgcccaggacgtggccatgacgtgcctgaccctggccaagcgtaccggttcgcaagccgtggacgaggcctatgccctgggcctgttccacgattgcggcgtgccgctgatgctcaagcggttccccaattacatggccgtgctggaagaggcctacgccaacgccggcccggattgccgcgtggtcgatactgagaacaatgcgttcaacaccaaccatgccgtggtcggctactacaccgccaaatcctggcgcctgccggagcacgtgaccgacgccatcgccaaccaccacaatgccctggcgatattcagcgatgagtcgtcgcgcaacccgcagcttaaaaacctgctggcgatcctgaagatggccgagcacatctgctcctcgtaccgcgtgctgggcaaccagtcggtggaccatgagtggaatgccatcggccatctggtgctggattacgtgggcctgtcggactacgactttgaaagcatgaagctgtcgattcgcgagctgggcgcccactaaacctgtcttcacgaggtatgcatgcccgagttaccagaagtcgaaaccacaagacgcgggattgcgccgcacctggaaggccaacgtgtcagccgggtggtggtgcgtgagcgccggctgcgctggccgattccggaagacctggatgtgcgcctgtcggggcagcgcatcgtgctggtggaacggcgggccaagtacctgttgatcaatgccgaagtgggcaccttgatcagccatttgggcatgtcggggaatttgcggctggtggaggtcggtttgccggcgctcaagcatgagcatgtggatatcgaactcgaatccggcctggccctgcgctacaccgacccacggcgttttggcgcgatgctctggagccaggacccgcacaaccacgagctgctgattcgcctggggccggaaccgttgaccgacctgtttgacggtgatcggttgttccaactgtcccgtgggcggtcgatggcggtgaagccgttcatcatggacaacgcggtggtggtgggtgtgggcaatatttatgcgacggaagcgttgtttgcggcggggatcgatccacgtcgcgaggcgggcggtatttcccgggcgcgttatctaaagctggcgattgagatcaagcgcgtcctggcggcggctatcgagcgtggcggtacgacgttgcgggactttatcggtggcgacgggcagccggggtatttccagcaggagttgttcgtctacggccggggtggcgaggcgtgcaaggtgtgcgggactgaactgcgcaatgtggtgctggggcagcgggcgagtgtgttttgcccaaggtgccagcgctgattgctgtgtgaaggctgaggccgacatcgcgggcaagtccgctcccacacttgatcgggttcacacggtcaaaatgtgggaaatgtgggagctggcttgcctgcgatgaggcccgctcagccaccacaaggcgtcaggctttaccggtaatcaaccggtacttctccatcaactgctcttccgtctctggatgcgcttcatccagcggaatgcaatccaccgggcaaacctgctggcactgcggctcgtcgtagtggccaacgcactgggtgcacaggttggggtcgatcacgtagatctcttcgccttgggaaatcgcggcgttcgggcactcgggttcgcagacgtcgcaattgatgcaatcgtcggtgatgatcagggacatggaaactcctgccagggccgtcagccaaggcatctgaaaactaatgcgcgcaattgtgccgcattggcgcccgcagtgcgagcgggcgccgcttgagcggtcttacttcttgaagcgcagcgtcagtgcatccgcgacagccgggtgcacgaacttggtgatatccccgcccaaggcggcgatttcacggaccaacgtcgaggaaatgaacgaatagcgttccgacggcgtaagaaacaggctttccacgtccggcgccagttggcggttcatgttggccagctggaattcgtattcgaagtccgacaccgcgcgcaggccgcgcaggaacacgttggcgttctgctctttggcgaaatgtgccagcagcgtcgaaaagccgaccacttccacattgggcaggtgcttggtgacctcacgcgccagctccacgcgctgttccaggggaaacagcgggtttttcttggggctggcggcgaccgcgatgatcacatggtcgaacaggcgagaggcacgttcgaccagatcgccatggcctttggtaatcgggtcgaaggtacctgggtacaacactcggttcatcgcgtcgtcctggcggagtccgttggggaaccggatggtatcgcagccttcccggtcggccaagtcaacttatgcataagaaagccgtatagacactgcgaatcccgtgttttttcacgctgttttcagacgttcggccaatgccgtggcgagttgggcggttaagccgtacaccgacaattgcgggttagccccaatgctggtggggaataacgagccatcgtggatcgacaaattgcgcagttggtggtggcgacccaggctgtcagtgacggcatttttcgggtcttcgcccatggcgcaaccgcccatcacatgggcgctgcccagcgtggtccggtgcaattccaggctcaggccgtcaatcaggctttttgcctcggccaaggtggtgacgtagcgcgcatcgtggtgcagcggcttgaccgacttggcgcccgccgcgaactgaatctcggccatagtgtggaacgcccggcgcaggccgtcccaggcgtaatccgagacctgataatcgagcacgggcgtgccgtcgccgcgcaactccacggtgccgccggggctgtcggggtgaaacccgtcacgcagcaaggcgagcatggcgtgggtgtggggcagctggctcatctccagggcgttttgcgtgccgtagccgccgaacagggtgctggccaagcccggatgcaaaggcggagcctccagcttgtaggacattttgccggtggtgccgtcctgccattggaaatggtcggaatagatcgactgcggcgcgccgtagaacgggttgatcacttcgtcgaacagcccggcagagaaattcaccaaatgcaaaaaggtgcgcttgcccagccgtgaatgcgggtcgggtgcgtcggagcgcatcagcagcgccgggctgttgatgccgccgcccgacagcacgtaatgcttggccttcaccgtgatcttgtggccggtcggtgccacgcagcgttcatccatcgccacgcattcgaggctgctgatcgtatcgccgctgtatttaaggtgttcggcgcgcgccagatagagcagttcgccacctttttccagggtggacgggatggtggtcaccaacatcgactgcttggcgttgaccgggcaccccatgccgcaataccccaggttgaagcagccgcgcacattgcgcgggatcacatgccagctgtagccaagcttttcgcagcctttgcggatcacatcattgttggcgttcggcggtatggcccacggcgcgatgcccaggcgttgctccatcttctcgaaccacggcgccatctctgcgctgctgtgacccttcaccgcgaactcgctggcccagtgggcgagggtggcgtcgggtgtgcgaaagctcgacgtccagttgatcagcgtggtgccgcccaccgcccggccctgcaggatggtgattgcgccgtccttgctcatgcggccgatgccttcctgatacaggctggcgtaggcctcgtcctcgagtagtttgaagtcgctgctggtcttgagcgggccttcttcgatcagcaaaaccttgtagccggcggcgctgaggatttcggccgtcgtgccgcccccggcaccgctgccgatgattgccacgtcggcttccagcgtcaggtcgctgctcaaggcggcgccattgtgggttttccagccacgggccaggccgtcgcggaacagatcgggtacgggcatagacgtgcactcttattgttgtacgaagttgcagtcaatgtgggagctggcttgcctgcgatagcggtttgcctgccgacacattcttcgctgatataccgcgatcgcaggcaagccagctcccacagttaatcgggttgtcagggtcagattttgggtgggccgggatagccgcaatgcgcccacgacgcgggccggaagtaccaggccatgatcaccagcttgagcaacgagccctggcccatgcgcagcaggttgaggtaactgttttcccaacggtgcaggaaattgcggatttgctctgcgctggcgtgttcccaactgccccagatgccggtcaacgggcctcgggtaatgcccatacccaatacatcaaacaactgttgggtgagcttgaacatctccggcgacaggtgctgcaggctgtagtcgagttttttcagggtgtcttcgatgcctgcaaccacctcctgggcactggccgcgccttcgagcagcaccgggatgacggcgcgtagaaacggcaggtcgctgctgcgcagcatggcaaagccgctggccggggtgctgctggagcaaccgctgaggctggcgcccagcccggcggtggccaggaaagcgctggcgcacaggccgattttcaagacgccacgccgcgacagcgcaggtgaatcagtcaggcttgggttcattgtttttattgtcccgtgaatagcgctatcagcggataaacagcttctggatcaacttctggatggatttgccgtaaggcgggtaaatcaacttcgccgcgttcaggcgctgcttgatcagtacacccttggctttgctgaaggtgaggaacccctcgtgcccgtggtaatggcccatgcccgacggcccgatgccgccgaagggcatgtcgtcttgagccacgtgcagcagcgtgtcgttcaggcacacgccgccggaatgggtttcgtggagtacgcggttttgctcgcccttgttgtagccgaagtagtacagggccagtgggcgcgggcgctggttgatgtaggcaaacgcttggtccaggccgcgatacggcacgatcggcagcagcgggccgaaaatttcgtcctgcatcacggtcatctcgtcactgacgttcagcagcaggctgtgggccatgcgccggtcctggcccttgtcgtaaagagggaccagggttgcgcctttgtcgacggcgtccttggcgtagctattgagccgcgccagttgccgttcgttgatgatggcggtgtagtccgggttgtccgccagcgtcggataaaagccgcgaaccgcttgggtgtaggcttcgacgaagccttcaacgcggtcttccggcaccagcacgtagtccggggctacgcaggtttgcccggcgttcaaggctttgccgaaggcgatacgctcggcggcatccttgagcggcacgtcggcggacacaatggcgggcgatttaccgcccagttccaatgtcaccggcgtgaggtgttctgcggcggcgcgcatcacgtgcttgccgatgctggtagcgccagtaaacagcaggtggtcaaagcgcaatttggaaaacgccatgcccacttcggcttcgcccagcaccacgcacaccaggtcttcaggaaagatcttcgccagcagcaccttgagcagctcaccggttgcgggcgtggattcgctgagtttgagcatcacccggttaccggcagcgagagcgccgaccagtgggccaatggccagatagagcgggtagttccagggcacaatcacgccgaccacgcccagcggttggtagatgactttggccgacgcgggctggaaggcaataccgacagcgcggcgggaaggtttcatccagcctttgaggtgtttgctggcatagtgaatgccatgcaaactgggcataagttcggcgaacagggtttcatctgcactgcgatggctgaaatcctggctgatcgcgcttatcaatgcctggcgttcgtcgctgagcaggtcgcgcaaggccttgagccattgctggcgttgcgcggccggcggcatcgggttggcagcgtaggcgctgcgttgggcgtcgaacaggtcctggagctgatccagcgcctgggaatcttgcaggtaagcgatgttggcagacatggcgcagttcccgattgttataggtctgcctggatttttagagtcattgctctaaattgtcaaatgtcattgcagtaacaagcggatttatcccgttgaggatagcccgtaagatgccccatcacgtgtatagaagctgatcccctatggcaccacgagtaaagaccagcgaacgcattgtgcaaatcagcctggagctgttcaaccagcagggcgagcgcagtgtcagcaccaaccatattgccgcccacatggaaatttccccgggcaacctgtactaccacttccctaacaagcaggcgatcatcgccgtgctgtttcgtgagtacgaagccctggtcgacagtttcctgcgcccgccccaaggccgcgccgttaccgtcgaagacaagcgtttctacctgcaagccgtgctggccgggatgtggcgctaccgcttcctgcatcgcgaccttgaacatttgctggaaagcgacccggagttggccaccggctaccggcgcttttcccagcgctgcctgactcagggcggcgccatttaccaagggtttgtcgacgctggcatcctcaacatggatccggtgcaaaccgaggccttgaccctcaatgcctggatcatcctcacctcttgggtgcgctttctgtgcaccaccaatgaaaactccgcccacctgagcgccgaggcgatcaagcgcggggtgtatcaggtgctggtgctggaggcggggtttgtcacgccccaggcgaaagaggcggtggatgcgttgttcaaagagttttatgtgccgctgaatcaggcactggaagaagtgaagtagggcctttcccgaatttgttcacaggagtccgtcatgccgcttgcccaactgatcagcccccagcaactggccgagcgccagaaggccggagggctggtgatcctggattgccgttttgccctggaagacccggattacgggcgttgcagctacgaagaggggcatgtcgaaggtgcacaatacgccgatttggagcgccacctcagtggcccggtgaccaagggcgtgacgggccgtcacccgttgccgacggcagacacgttggttcgacagttgcgtgcatggggcatcaatgccgacaccgatatcgtgctgtatgacgacggccccggcgcctatgccgcccgggcgtggtggttgctggtctggctgggcaagcgtgatggcgtgtttatcctcgacggaggcctcaaggcctggcacgccgcaggtttcccgttgagcctggacgcgccgatgatcgagccgggtaccttcacggggacccccgacaatcacctgctgctggatgccgaacacctgcaaaaacgcctcggccaaccgggcctcacgctgatcgatgctcgtgcccaagcgcgctttcgcggcgacgtggagcctatcgactcgatcgccgggcatattcccggcgcgcagtgtgcggcgtttaacgaaaacctcggcagcgacgggcggttcctgccggccgagcagctcaagcagcgctttgccgcgcaattgcagggccggtcgccggacgaactggtggcgtactgcggctcaggcgtgacggcgtgtcataacctgttcgcgttgagcttggcgggttacccgttgggcaagttgtatgcggggtcgtggagtgagtggattaccgatcccggtcgacagattgcgacgggtgactgagtcgtcggctatgtaaaccctatcaaatgtgggagctggcaagccagctcccacatgtttaaccctgttgtgtcaatagccattgggggatgcgccgctcaaggtagtaacccggccgcttcagcgaaccgtccacaaaccccacatgcccaccctttgccagcaactcaaactcggtgccagccgacagctcgctggcctcaggcaagctgtgcgcaaacacaaacgggtcatcggccgcctggataatcagggtcggcgtgcggatagcgcccaagtagtaccggctcgacgcgcggcggtaatagtcttcggcgctgagaaaaccatgcagcggcgcggtcacccggccgtcgaaatcccaaaacgtgcacatcttttccagcgagcccaggtcttccagggttttcagcccctcagccctgccatcctgtagaaaacggctctgtttgacacggatatacgcgagcatctcgcgcatgaagtgcttttgataaacccgcgagaaacccagcccgatgcggtccgcgcactggtccagacgaaacggcaccgacaccgccgccgcgccgtgcaggccggacgcctcgccggtttcgcccaagtgcttgagcagtacattgccgcccagcgaataacccaccgcatacagcggcgccaaggggcgcttggcccgcagatgagcgattgccgcggcgaggtcttcgctggcgcccgagtggtagctgcgcgccaagaggttgggttcgccggagcaaccccgccaattcagcgcagcgctggcccagccgtgagtggagagggctttttgcaggccggccacgtagggcgagttggaagagccggtcagcccgtgcagcaccagcaccaacggcgcttgcgcgtcgtgggggccgtgccagtcgagatcgagaaagtcgccatcatccagccacaggcgttcgcgttggcgctcgatgtgagtggtggcgcgccacagcgggccccacagcgtttgcaggtgggggttgccgaggccgaaggcgggagtgaacagctcggtggaaggcttcatggacatctctgtaacgagcaaggcttcatgtggcgagcaggcttgccctgcgttgggctgcgcagcagccccatcaaaagcaccgcgttgggtcattcagaacacggtcgcaggttttggggctgcttcgcagcccaacgcagggcaagcctgctcgccacaataagcccgcttgccacagaaaacctgctttgcacaacgagcccaaagttaagcggcgctttcgaccaaacggtgccacaacgcgtaatacacccgtccggacttctgctcccggtgcaggcgccacgcgcccggcaagccgagggtagacggtgcagtctcgctttcagtgtagatccacgcatccggcgccagccattggcgttcttccaacagtgcacacacggtgggtagcaggttctggttgaacggcgggtcgaggaacaccacgtcgtattcgctggccggctgggtttccaggtagcgcaacgcgtcggcggtttgtacctggccggtggtgcagcgcaaggtgcccaggtgttccttcaggcttgaaaccgcgatattgctcgcatccagcgcctggccctgggcggcaccacgggacagcgcctccaggaacagcgcgccgctgcccgcgaacgggtccagcaccttggcgccgccgatgtacggcgcaagccagttgaacagggtttcgcgtacgcggtcgggtgtcgggcgcaggcccaccacgtcggggaagctcagcttgcggctgccccattcgccgccaatgatgcgcagctggcccacaccgttatggacgttgtggacaggttttttcgggcgagatgaactggccattaatgctccggaaccccgagcggctgctcggcgggtttatcagtggggggcggtagtggcttttgcgcaatcgtcgggccggcggtcacgatgaccatcttgtcggcgctcaagtgtttattcattgcagccttgacctgatctacggtcagggcctgggattgtttcatgaaatcctcaagatagctcagcggcaggttatagaaacccatggcgcccagttgcccgacgatatcggcattgctggcggtggacagcgggaagctgccggccagctcgcgcttggcgtcatccagttccttttgcgtcgggccggtcttgaggtagtcggccagcacgtcctcgaccaggcgcagggtgccgccgctcatttcggcgcgggtctgcagctggatcatgaacgggccgcgcacctgcatcggtgagaaaccggagtacacgccataggtcaggccgcgtttctcgcgcacttcactcatcagacgcgtaccgaaaccaccgccccccagaatctggttacccagagacaacgctgcgtagtccgggtcggcacggtcgatgcccaattgcgcgaacagcaagtgcgtctgcttggacgggaactcgatatggctcaagccagccttcggctcggtcggttgggcgatcttcgccagcgccgggcctttgggcagcgatgcggacaccttggcggtcatggcttcggcttcggcgcgggtcaggtcgcccaccactgcaatcaccgcattgcctgccgcatacgccctggcatggaacgcctgcagctgtgccagggtaatcgccggaacactttcaggcgtgccttcactcgagtgagcgtaggggtggttgccatacaggcgcttgaacagctcaaggctggccagcttggccgggttctgtttctggtattcaaatccggcgaggatctggttcttgatgcgcgccagtgagtcggcggggaaggtcggcttgccgatcacctcgtcgaacagtgccagggcggcctcgcgcttgtcgctgtcgctcaggctgcgcagggataccagcgccatgtcgcggaaagcgccattgccaaagtctgcgcccaggccttcaaaaccgctggcgatctggctgacgtctttgcccggcacgccttcgttgagcatggcgttggtcagcagcgccacgcccggcgtgttgccgtcctggctgctgccggcggcgaacaggatgcgcatgtcgaacatcggcagttcgtgggcttccacaaacaacaccttggcgccttcggcggtggtccaggtttgcacgtcgagcttgcggttggtcggtgctttgccgtccagctctgccagcgattgcagcttgttggccgattgggctttttccagcgcctggctggctacggaatcactcgggcgcaggaaatacacggcgctggcggcaatcagggtgacgacgatcaggccggggaagatcaggcggctgcttttgcgatcactcatgagcggtctcctcaggcaaaacatgggcgacgctcagacgttcgcgtgtgaaataggtgcgcgcggctttctggatatcttccggggtcacgctttgcaggtcggccagttcggtgtccatcagcttccaggacaggccgacggtttccagcgagccgatggccgtggcctggctggtgatggagtcacgctggtagacgaggccggcaatcacttgggcgcggatacgctcaagctcttcggtggtcggtggtttggctttcagctcgtccagcaggcgccacaggccggcttcggcttgggcaacggtctttttcttttgctggttcggcgtggcgctcagggtgaacaggctgtcgccacgggtgtaggcgtcatagctggtggaagcggcggacaccagctcctcaccacgctccagctgctcggagatgcgcgcgctgtagccgccgtccagcagggccgagatcaggcgcagagcctgtaccgagcgcttgtcttcggcggtggccaggccgggtacgttaaagccgaggatcacgctgggcagttgggtttgcacatgcagggtcagcaaacgctcgccgggttcggccagctccagcggaatcttggccggtggtacgtcacgtttcgggatcgggccgaagtaacgctgggcgaggtttttcacctcgtcaggggtcacgtcgccgacgactaccagcgtggcgttgttcggcacataccaggattggtaccagtggcgcagctcctcgaccttcatgcgttcaaggtcggccatccagccgatagtcggcgtgtggtagccgctggccgggtaggccatggccttgaagcgctcaaaggccttggacatcgggttgtcgtcggtgcgcaggcggcgctcttccttgatgacctcgatttcccggctgaactcgtcggccggcaggcgcaggctggccatgcggtcggcttccagctcgaaggcaacgcccaggcggtcgcgggccagtacctggtaataggcggtgtagtcgtcactggtgaacgcgttttcctcggcgcccaggtcgcgcaggatcagcgaggcctcgccggggccgactttggcgctgcccttgaacatcatgtgttcaagcgcgtgggacaaaccggtctggcccggggtttcgtagctcgagccgaccttgtaccagacctgggaaaccaccaccggcgcgcgatggtcttcgcgcacgaccactttgaggccgttatcgagagtgaattcatgggtgggttgtgggtcggcagccaaagctgaaaggggcagacaaactgtgctgagcagcaggcctgcggcacggcgggctagagcattcattcgttttttaacctgttgggctgcccgcttggtcttagcgtcggcgggcgagagggtgctaggatactgatccgatttgggcacggccactgcggcggtcatcttgtaccggatccaatcgtaggaatgtaggatttggcgcagggtttccccgacgatgttccacttttcgacgaatttatcgcttcagtcctatattgaaacgattcgttaaggcctttatttacgccttaccaaatgttgcgcatgaacaagcgagccttaaagcagtctgttctgcatcgaatttatttaccgaggcgccctggcgcatcgctactttgagatagccgtcctccatgtttggttccaacgacgacaagaagaacccagccgcggctggcgagaaaaaaggcctgttcggatggctgcgcaaaaagccgcaggaagccgtcgtcgaacagccgcaggttcaacctgaacccattcctgaacctttagtggaagccgaaccggttgttgaaaccccggcgcctatcgtgttgccgatggccgagccggtgttgcagccggtggctgaggttgagcctgagcacaaaccgtggctggaactgccggtggccgaggagcctgtagcactggttgaagatgttcgggccgagcacgtagtgccgccgattccggcagtggttgagccggttgccgttgtcgttgaagccgcgccgagtgttgaagccaccgcgctggctgagccatcgcctgcacccgccgtggttgcagtgcccgccgtggctgaacctgagcccgttgccgttgccgtcgaaaccagcaaaaccggctttttcgcccgcctcaagcaaggcctgagcaaaaccagcgccagcattggcgagggcatggccagcctgttcctgggcaagaaggtcattgatgacgaactgctggaagacatcgaaacccgcctgctgacggctgacgtgggcgttgaagccacggccgtgattatccagagcctcacccagaaggtcgcgcgcaagcagctgaccgacgccgatgccctgtacaaatccttgcaggccgaattggcggcgatgctcaagcctgtggaagccccgctggtgatcacgccgaacaagccgttcgtgattctggtggtgggcgtcaacggcgccggcaagaccaccaccatcggcaaattggccaagaagctgcagtcggaaggcaagaaagtcatgctcgccgccggcgataccttccgtgccgccgctgtcgaacagctgcaagtctggggcgagcgcaacaagatcccggttatcgcgcagcacacgggcgcggattcggcttcggtgatcttcgacgccgtacaggccgccaaggctcgtaacatcgatgtgttgatcgccgacactgccggccgcctgcacaccaaagacaatttgatggaagagctgaagaaagtgcgccgcgtgatcggcaagcttgacgcagacgccccccacgaagtgttgctggtgctcgacgccggtaccgggcagaacgctatcagccaggccaaacaattcaaccagacggtgcaactgactggcctggcattgactaagctcgacggcacggccaaaggcggcgtgattttcgcgctggccaagcagttcgggttgccgattcgttatatcggcgtcggtgaaggcatcgacgacctgcgcacctttgaagccgaaccctttgtacaggcacttttcgccgagcgggagcgttcatgattcgattcgaacaggtcggtaaacgctatgccaacgggcatgtgggcttgcatgagctgagctttcgagtgcgtcgcggcgaattcttgtttgtgaccggtcactcgggcgcgggcaaaagtacgttgttgcgtctgttgctggccatggagcgcccaaccacgggcaagctgctgctggcgggccaggatctggccaccatcagcaacgcgcagattcccttcctgcgccgccagatcggcgtggtgttccagaatcaccagttactgtttgatcgcacggtgttcaacaacattgccttgccgctgcaaatcctcggtctgtccaaggccgaaatcgtcaagcgcgtggattcggccctggagcgcgtggcgctgtcggacaagaccgatctgtaccccggcgacctgtccaccggccagcaacagcgcgtcggcattgcccgcgctatcgttcaccgcccggccttgctgctggcggacgagcccaccggtaacctcgacccgcgcctggcggccgaaatcatgggcgtgtttgaagacatcaaccgcctgggcaccagcgtgcttatcgccagccacgacctggcgctgatcgcccgcatgcgccaccgcatgctgaccttgcaacgcggccgcctgatcggtgacggggaggccggtgtatgagtgccacccgcagccctaaagtgtccgagcgcgtggcgccgaaagccgccgacccgcaaccgcagaaaaagaaaaaacacgacgatgacgatggcccggacttcggcacgctcctgcgcgcctggatcgaaagccatcgcgccagtttgctcgacagcctgcgtcgcctgggcaagcagccgatcggcagcttttttacctgcctggtgatggcggttgccttgagcctgccgatgggtttgtcattgctgctgaataatgtggagcgcctcggcggttcctggcagcgtgcggcgcagatctccctgtacttgaacatcgacgccagtgccaaagacggcgagtccttgcgtgatgacatcaagcagctgccgggcgtggcggatgccgaatacatcagccgcgaccaggctcttgaagagttccagcaacaatccggcttgggcgaagcccttaaagagctgccgcagaacccgctgccgggcgtggtgctggtgacgccgaatgaggtcgacaagcccgcgcttgaggccctgcgacaaaaactcgcagaaatgcccaaggtgcagcaggcacaacttgatctagtctgggtagagcgcctggcggcgatcctcaagctgggtgatcgcttcgtgttcggcctgacggtgttattggtgtctgcattacttttggtgataggtaataccattcgtcttcatattgaaaaccgtcgcaccgagatagaagtgattaaactggtcggcggcacggacagctatgtgcgtcgtccttttctgtacatgggcgcgctttatggctttggtgccgggattttgtcctggggcgtgctggcatttggcctgaactggctgaacgacgcggtagtcgggcttgccggactctacggcagcgattttgccctggccggggtgccggtcgccgacggtcttagcctcttgcttggcgcggtattgttggggtatatcggtgcttggattgcggttgctcgtcacttacgtgagctggcaccgaagtagttaatgtcagattaatgtggtttcgtttgtattgaccgtatcagtggtttagggaacttgtcctacggtttccggtcaattttcgcagtgctgaactgcacgagttatgtgagtcggaggttttttcgtatgaccacttctttgcaacctgcttatgctctggtcccgggtgcgaacctggaggcttatgtgcacacggtcaacagcattcccttgctgacgcccgagcaggagcgtgaactggccgagagtctctactatgagcaggatttgggggcggctcggcagatggtgctcgcccacctgcgttttgttgtacatatcgcccgtagctatagtggctacggcctggcccaggctgacctgatccaggaaggcaacgtcggtttgatgaaggctgtaaagcgcttcaaccctgagatgggtgtgcgtttggtgtcgtttgccgtgcactggatcaaggcggaaatccacgagttcatcctgcgcaactggcgcatcgtgaaagtggcgaccaccaaggcccagcgcaaactgttcttcaacctgcgcagccagaagaaacgcctggcgtggctgaacaacgaggaagtccaccgcgtggccgaaagcctcggtgtggagccccgtgaagtgcgcgagatggaaagccgcctgaccggccatgacatggccttcgacccggccgccgaagcggacgacgacagcgccttccaatcgccggccaactacctggaagatcaccggtacgacccggcgcgtcaactggaggatgcggactggagcgacaactccaaccacaacctgcacgaagcgctggaagtgctggacgaccgaagccgtgacatcctctaccagcgttggctggcagaagacaaagctacgctgcacgacctggcgcagaagtacaatgtgtcggccgagcggattcgtcagcttgagaaaagcgcgatgaacaagctgaagttgtcgatcgctgcttaaaacgcagcaataaaaaatgccccggtcgaaagatcggggcatttttgtacgtgcctaacgcggtccaatgtgggagctggcttgcctgcgatagcggtgggtcagcctgcaaatgagctgactgacagtgcctcatcgcaggcaagccagctcccacaggaaccgtgttgtgtcagtcggaccagggggctttgcgggtgttgttcagttccaccaagtagccatcgccacccagttgactcatctgttggcgaatccacgccgcgcgccgtgccacataggcagttggatggctagcgctccaaaccctgggattaggcaacaccgccgccagataactcgcctgctgccgcgacagccctttggcactcaccccgaagtgatgccgcgccgccgcctctgcgccaaacacgccttcatcccattccacgctattgaggtacacctcaagaatccgctgcttgggccacaacacttcgatcagcccggtaaaccacgcttccagccctttgcgcagatagctgcggccggtccacagaaacaggtttttcgacacctgctggctcaaggtgctggcgccgcgaatcgagccgccgcgctcgttgtgcaggatcgccgcctgaattgcgccgaaatcaaagccccaatgctgcggaaaacgctggtcttcacccgccatcaccgccaccttgaggtcatcggagatctcgtcccacgccacccacgtgcgctgcaggtcaatcggctcgccgtcgacccatgattcgatcttgcgctcgaccatcagcgcagtgaacggcggcggcacgacgcgaaacagcagcaccagcaacacactgccgatggcaaaccatttcacgactttgagaaaacgcttgaagaggagacgcagcatagagatggcttggccgaacccgttgagcgggccattatacagaccctgccccttgcgtctgactggagttcctcatgctgcgtagctttctgatgctggccgcctttttcggcttcaccggcgtcgcgctcggtgccttcgccgcccatggcctgaaaaaccgcctgagcgccgagtacctggcaatcttccataccggcgtcacctaccaattgatacacgccctggcgttattcggcgtagcactgttggccgcacatattcctggccgattgatcaactgggcgggtatctcgtttaccgtcggcatcctgctgttctccggcagcctgtatgtgttgacgctgacaggtttcagcaagctcggcatcatcacgccctttggcggtttggcctttctgctgggctggttcttcctcggtttggcggcgtggcgtttgcaggccatatgaccgaggggcttgggcctgcaacggcaatcgggctagaatgcgggcccctaaaaacgatggcggcccgtggcatgcgcattctgttgaacggcgaatcctttgaactgcccgacggtgaaaccgttgcggccctgctgacccgcctcgacctgaccgggcgtcgcgtcgcagtggaactcaacctggatatcgtcccgcgtagccagcacgccgagaccgcgctcaccgaaggcgatcaggtggaagtggtccacgccatcggcggcggttagccgcgcagctttctgaattctgcagaacctcactccatttcgaggatttcccatgagcatcgttcgtagcgacaagcccttcgtcctggccggtcgtaccttccagtcccgtctgctggtcggcaccggcaagtaccgcgacatggaagaaacccgccaggccatcgaagcctcgggtgccgagatcgtcacctttgccgtgcgccgcaccaacctgggccagatcgaaggcgagccgaacctgctcgaagtgctgtcgccggatcgctacaccttcctgccgaacaccgccggttgctacgacgccatcgaagccgtgcgcacctgccgcctggcccgtgagctgctcgacggccacaacctggtgaagctggaagtgctggccgaccagaaaaccctgtttcccaatgtgatcgaaaccctcaaggccgccgaaaccctggtcaaggaaggcttcgacgtgatggtctacaccagcgatgacccgatcatcgcgcgccaactggcggaaatcggctgtattgccgtaatgccgctggccggtctgatcggttccggcctgggcatctgcaacccctacaacctgcagatcatcctcgaagaagcgaaaatcccggtgctggtggatgcgggcgtgggcacagcctccgacgcgaccatcgccatggaactgggctgcgatgcggtgctgatgaactcggccatcgcccacgcccagcaaccgatcatgatggccgaagccatgaaccacgccatcgtcgcaggccgcttggcctacctcgccgggcgcatgccgaaaaaactctacgccagcgcctcctcgccgctggatggtctgatcaagtaagagccattgatgactgaatcaaacgaaacgccgaacaccgtggaagaaggtgacgagtccaagcaccgccgcatcaagagctttgtgatgcgcgccggccgcatgaccgaaggccagcaaaagggcctggaacaaggtacgccgctgttcgttttgccgttggccgatgcgccggtggactacgaccaggtgttcggccgttcggccccgcgttccctggaaatcggtttcggcatgggccattccctgctggaaatggctgccgcctcgccggaacaggatttcatcggcgttgaagtgcaccgtccgggtgtcggcgcgctgctcaatggcgtgctgactcaaggcctgacgaatctgcgcgtctacgattgcgacgcgatcgaagtgctcaaccgctgcatcgccgacaacagcctcgaccgcctgatgttgttcttcccggacccatggcacaaatcccgtcaccacaagcgtcgcatcgtccaggcctccttcgcggaactggtacgcagcaagctgaaagtgggcggcatcctgcacatggccaccgactgggaaccgtacgcagagtacatgctggaagtgatggacgtagcgcctggctaccgcaacctggccgaagacggcaaatgcgtgccacgcccggccgagcgcccgatcaccaagttcgaacgccgcggcgagcgactcgggcatggtgtatgggatttgaagttcgaaaaaatcgactgagtagcacagggtcaaaactgtgggagctgggttgctggagttggtggcgatccatcgccatttggttggttacttgtaaaggaatacacgggtttgaaatccattctctgttgttcggtactgctgggcttgctgtcttcgacggtttttgctgccaccaccccctccctgccagtgacgtccccggacgactacttcgagcgtgctcaatcgagagcggaacaactcagcgcgttgcttgaggaaaacctgcctctggaggccagcggcaagctggatcccaaggtcgcggctgagttggccaaagaagggaaggataagttagccgcgttgcaaaacgacctgaagatggcttccgacggtgggcatacagtggcgacttacatgctggccaatatgcaaagccggttcgggatgtcggacgcagagcgcaaacaagtgtgcgagccgatgcacagggcaatggatcagggtttgttggcagcagcggtaggttattactatcaatgcgaccagacttacatgcgccttaatcttcttgaccctggccatgtgaagtacctggaggatctcaagcagatgctcctgcgcactgatgggtttcgggactattacccgttgtacacacagcgctcgctatgtttcgagagagatcgtctggctgagatcaaggaggaatggaccgtagccaaccagcaggcgcaggccagtgcgcgaatgttgacctacgaccagtatcgagcggacgcctattacatactggccgcaactcgaatgaacgaaaaaggcatgcccgacagcctcaacctgacctacctgaatcaggcgctggcgttgggctgcaaagacccgatgacgcttaaagagtattacgagaaggcttttggagggcaggcgtccaaatagcgttgtttcgttcaatgcgggtcaatggctcgcgccaggcgacttggggcgggatttgaagttcgagaagtatgcgatcagaaatgtgggagctggcttgcctgcgatagcatcacctcggtctgtctgatagaccgaagtgtctgtatcgcaggcaagccagctcccacatttgttatgcagtgtgctcaggattagcggcggtcggctactacgccgatcaacaccagcaccaccaccaacaccggcgccaggctgtagttattgaactggctcaaccctcgcacaatccacggcgtggcgtagatcaacgccgcgccgctgccgatcatgcacaccaatgccatcaacggtacgcgcaacgcgcctgcaatactgcccaagcgtgcttcgacccagcctttgatatcggcgccaaacagcaccagcaaacagccgacaagggccagggagatttccgacaggttgctacggctccagcgggacacggtggcgagcaggtcgagtaccaaatccatgtgatttccttagagcgatcagctcaaaaacttctgcaacaggtcattgagaaagagttgcccacggtcggtggccgccaggcgtgacggttcgacctgcattaagccactttgttctgcttcacggcggccttcgtcgaggctggccaggtcgaggccggtgcgctcggcgtacagcctggattcaacgccttcggtgagccgcaaagcgttcatcaggaattcgaatggcagctcttcgttagtcagctctttcgcgccggcctggaagctttttgccgggttgaggtagtccttgggtgctcgggtcttccaggtgcgcacgatgcgcccgtccgggtggctgagcttgccgtgggcaccggcgccgatgccgataaagtcgccgaagctccaatagttcaggttgtgtcgcgccgggcggcccggttgggcataggccgatacttcatattgcgcgtaaccgtgttcggccagcagcgcctggccggcttcctgaatgtcccacagcgtgtcgtcttccggcagcgcgggcggctggttccagaatacggtgttgggttccagcgtcagctgataccaggacaggtgcgtaggcttgagtgcgatggcctggcgcaagtcgctcagggcatcgtccagcgactgatcgggcaagccgtgcatcaggtccaggttgaagttatcgaacccggcctggcgtgccatgccggcggcgcgcacggcttcatcgccattatggatgcggcccagcgcctcaagcttttgctgctggaagctctgaatgccgatggacaggcgattgatccccagttttcggtatgccacgaacttctcttgctcgaacgtcccggggttggcttccagggtgatttcgatgtcgtcggcaaacgggatacgagcttgcacgcccttgagcaggcgccccagcgcggcggcgctgaacaggctgggcgtgccgccaccgaagaaaatcgagctcagttcacggccgtaaaccgcgtgcaggtcttgatcaaggtcggccagcaacgcgtccacatactcttcttccggcagcactttgctggcggtgtgggagttgaaatcgcaataagggcatttgcgcacgcaccacgggatgtggatgtacagcgccaggggcggcagcaccggcaaggccgcccgaggtgtttgcgcgccgccgtggatcagcggctgcgcagaagtgttctgggtcatttcaggcccagacgctggcgcagcagaaccatggcacgggcgcgatggctgatctggtttttgtcggccgggctcagctcggcgctggagacattgcgctccggcacccagaacagcgggtcatagccaaagccatgttcaccgctggccgcgtgcagaatgcgcccgtgccacaggccttcgcagagaatcggcaatggatcatcggcatggcgaaccagcgccagcacacagacgaactgcgcgccgcgctcggcatccggcacctccttgagggcatccagcagcttggcgttgttggcggcatcgcctttgccatcggcataacgcgccgagtagatgcctggtgcaccgccgaggaaatccaccgccaggcccgaatcatccgccagcgccgacaggccggagatgcgcgccgcattgcgcgccttgaggatggcgttctcgacgaacgacaggccggtttcttccggctccacctggctgaactcgccaatcgagcgcagttgcacggactcgccgagcatggcctgcagttctttgagtttgccggcgttatggctggccagtacgagttgggaaaggttcatcattcggccgggaaaagttcttggacaaaactgaagccgtgggccttgccgccggtttcaacgttgatggtgaaggtcttgaattcctgctgcggcacggtgtagggcgcgaggtagttggtcacgcctttttcggtgatctgcttgaaggtcagcacttcgcttttgccgagtgagtccttgatggtgccggtcacttgcgccaccacgggcgtcacgcccttgaagacggaaacgttgatcaggcctttgttcttgctgcgcaccacacctgcggcctgggcggtttccggctgcaggaaactggaggtgaaggtgttgtagcgcacggtgatgtcgccaaattctttcgtgcggttagggtcgataacgtcggcggccatggcgttggcgccaagcagtgcggtcaataaaaaaacagccaaacgactcatgagcgtccctcttgaaaatgattagacggcaatcttgtggtcggtcaggccagggctgctgacccggtaaatcccgatttcgcccaacaggttgggccatagcttactcgcccagccgtggcggtgctgttgatcgacggcaaggcggttgatgactttggcttcacgctcgccgcacagggcttcgaagtcttcgaaggtgcagaagtgaatgttgggcgtgttgtaccaggtgtacggcaggaaatccgacaccggcatgcggcctttggtggccaggtaccagcggcagcgccaatggccgaagttggggaaggtgatgatgcactggcggcccacgcgcagcatttcgtcgaggatacggtccgggtagtgcacggcttgcagggcctgggtcatgaccacgatgtcgaagctgttgctggcaaagttgcccaggcccttgtccaggtcctgctcgatcacgttgatgcccttggccacgcactgggcgatattgtccgggtcgttttccaggccatagccggtgacttgcttgttgtcgcgcagccagctcagcagttcgccatcaccgcagccaaggtcgagcacgcggctgccggcggggatccagtcttggatgatttccaggtcggctctcatggctttctcacaatacgattcggttcatgtaattgccgaacgcctgcaagtaacgcgggatcggaatcaggaaggcgtcgtggccttgcggcgcgtcgatctccaggtagcagacgtctttgcgcgcggccatcaacgcgtccaccagctcgcgcgagcgcgccggcgaaaaacgccagtcagtggtgaacgacatcacgcagaacttggccgtggcgtgctcgaaggttttcgccaggtcatcgtcgtggttggcggccgggtcgaaatagtccagcgccttggtcatcaacaggtaggtgttggcgtcgaaacgcccggagaactcctcgccctggtagcgcaggtagctttccacctggaactcgacgctgtggaaatcgtagttgagcttttcactcttgaggccacggccgaatttctcgcccatggagtcatcggacaggtaggtgatatgcccgaccatccgcgccagcatcaggccgcgcttggggatcacgccggcttcctggaacgaaccgccgtggaattcggggtcggtgaggatggcttggcgcgccacttcgttgaaggcgatgttctgtgccgacagttttggcgccgaggcgatggccaggcaatggcgcacgcgatccgggtaagtgatggtccattgcagcgcctgcatgccgcccaggctgccgccgatcactgccgcccactggtgaatgcccagcacgtctgcaaggtgcgcctggctgtgcacccagtcttccacggtcagtaccgggaagtcggcgccgaagggcttgccggtttccgggttgatactgctcgggccggtagaaccgttgcaaccgccgaggttgttcaggctgaccacaaagaatttgttggtgtcgataggtttgccggggccgatgcagctgtcccaccagccgggcttgcgctcgtcggccgagtggaagccggcggcgtgatgatggccggacagggcgtggcagatcagcacggcattgctcgccgtggcgttcagttggccgtaggtttcatagatcaggtcgtaggctggcagtgaacggccgcaggccagggccagcggttcgctgaagtgcgccacttggggcacgaccagtccaacagaatcgggggggaaggcagctggcatcgaccctgctctcgtttaaatgaggcgtaagtctaaagagcggggggcgtagcggcaagcaaaggcctgcacggattcaaatcaataaacagatacaaaatgtgggcgccgggctgtgtgggagctggcttgcctgcgataaaggcacctcggtgtgtcagtcacaccgcggcgatgcaatcgcaggcaagccagctcccacacaagccagttcccacagggggcgtgtcagatcaggccgaacagctctttaggcatgtaggcaaagtacgccaaccgcggaatcacccagctttgcagcaactggatcgcgataaacgcgaagatcggcgagatatccaggccgcccaggttcgggatcagccgacggaagggggcgagtaccggctcggtgatttgcgccaccagctcggcgccagggctgcggctgccgggggcgacccacgagaggatcacgctgatgatcatcgaccagaagatgatcttcaaaaacagcgagaaaatgccgatcaggccccatggcagcagcagcacggtgttggcctggtagccgttgagcagcaggatcaccgcaaacagcaggatttgcagcagcagcgccagcaccagcgacgacatgtcgagcccgaacatgctcgggatcacccggcgcaggggcttgagcaacggttgcgtagccttgaccacgaactggcacagcgggttgtagaagttcgcccgcaccaattgcaggataaaacgcatcagcacgatcagcaggtacaggctgccgagggtctggatgatgaaaatggcagcgtcattgattccgagcatgtttgtttccttgtagggggacgactatttgcccagctgttcggccatttcagccgaacgatgcgccgcggcacccagtgctttttccaccagggcttcaaagcccccggcctggaacgattcgattgccgcttgtgtggtaccgccaggggaggtcacacggcggcgcagttcagaggcgtccacatcgctggtcacggccatcttcgcggcgcccagtgcggtttgttcagccaattgcttggcgatttcctgcggcaggcccagtttcacgccggcggcggtcatggcttcgatcagcaggaagaagtacgccgggccgctgccggagacggcggtgaccgcgtccagttgctgttcctgttccagccacagggcgatgcccacggcggacagcaactcctgggcctggtcacgctgttcagtggtgacttcagatgttgcatacaagccactcacaccctggcgcagcagcgacggggtgttgggcatgcagcgcacgatgggttgggcgccgagccagtgggtcatgctggcgcaggtgataccggcggcgatcgacaccaccagctgatgcggttgcaggctcgggcgcaggctttcacacacagccttcatggcttgcggcttgaccgccagcacgatcacgtccacgccctgaatggcttcggcgttgtcggcgaaggtttcgataccgtgctcggcgctgacgcgggcgcgtgtgtcggcgcccgggtcgctggcgcggatttgtgcggcttccaagcctttggcccgcaggccgccgatcaagctggcggccatgttaccggcgccgataaaggcaatacgcgtgtcgctcatgacaggtccttactcagatggaagtcagccatttcacggctggccgtagtcgcgggcgccaaacagcgcggtaccgatccgcacccaggtggcgccttgggcgatggccgactcaaggtcgtggctcatgcccatggaaagtgtgtccagcggcaggttcaaacgggcttgcagctcgcgaacggtggcgaaggctgcatcttgcgcggcgcgatcttcggtcggctcgggaatggccatcaagccacgcagcttcaagcgcggcagggcgctgatcgcgtctgccagggccggcaggtcggcgggcgtacagccggacttgctggcttcaccactgacgttgacctggatgcagatattcagcggcggcaggtcggccgggcgttgctcggagaggcgttgtgcgattttcaggcggtccacggaatgcacccaagcgaagttctcggcgatagcgcgcgtcttgttcgattgaatggggccgatgaagtgccaactcaagggcaggtcggttaattcggcctgtttgcccaaggcttcctgcaggtaattctcgccaaaatcgcgcatcccggcggcataggcttcgcgcacggcctgggcgggtttggtcttgctcacggccagcaggtggatgctgctttcgtcgcgctgcacggcgtgggctgcggcgcggatccgctggctaaccaggccaatgttgtctgctatcgtcgacattcaagttgcacccgtggatatggagtccgcggcattctactggaaatggaaagccctatggatatcactgaattgctgacggcaggcgtgcgccgtggcgcgtccgacctgcatttgtcagctggcctggtgccgatgttgcgggttgatggcgaggtttggccactggagggcccgacactttcacctacgcaagttgcggatttattgagcccattgctcaacctgcaccagcaaaaggatttcgaaacatctcttgaaacggattttgccttcgagctgcccggagtggggcggtttcgcgccaacgtgtttcagcaggatcgtggcatgggtgcggtgtttcgcaccataccggcgcaagtgcaaagcctggaaagcctcgggctgggggaggttttccaacggatcgcccagttgccgcgcgggctggtactggtgaccgggcccacgggctccggcaagtccacgacgctggcggcgatgatcgattttctcaatcggcatcggcgttatcacatcctcacgctggaagaccccatcgagtttatccacaggccaaaaacggcgctgatcaaccagcgccaggtgcatcgggatacccacagtttttcagcggccctgcgttcggccttgcgtgaagatccggatgtaatcctggtaggtgagttgcgcgacctggaaaccatccgcctggcgctgacggcggctgagaccgggcacctggtatttggcaccctgcacacctcgtcggccgcaaagacggtagacaggctggtggacgtcttcccggccggtgaaaaaagccatggtgcgctcgatgttgtcggagtcgctagaggcggtggtgtctcaggtattggtgaagaagattggcggcgggcgcgtggcggcccatgaaatcatgctgggcacaccggcgattcggaatttgatccgcgaggacaagggcgcgcagatggtctcggcgatccagaccggtggggcgttggggatgaagacgctggatatgagtttgaaggcgctggtgggcgaggggctgatcagccgggaggatgcgcgggataaggcgagagtgcccgcagatatctgaaggctgatgaaatcagtgtgggagctggcttgcctgcgatagcggactgccaggcaacacctttgtcggttggcacagcgtcatcgcaggcaagccagctcccacatttgattgcatttcaaagggggagccagccgcctttaggatcagcgctgaacaacccgcaggttgttgttctgctctttcggcagaacccgcttggcaatcacgtagttcttgtcccaaaacggttttttcagcgtgtcgatgctgaccgatttgccacgacgcggtgcgtggataaagcggtcgttgcccaggtagatggcaacatggttgacctggcggctcttgagcttgaagaacaacagatcgcccggcttcaggtccttgcggtctaccttcagcccgtggccggcggccatggcgttggaggtacgtggcaaatccacggcttttacgtcgttaaacgcatatttcaccaaaccgctgcagtcgaaccctttacttgggctgctgccgccccaacgataaggggtaccgagcacgttaacggcgcggctgaggacgttgctgctttgcttggtgttgacggccagttgggtgtgaagtgctttaccgtgggccttgctcacttgagtcgggcggttgacggtcagctttaccgacttggcagtgctgggtgtgctgtgaactttaggggtgaaaccgttaacgttaggaagacgttgctcacgattggtggcgtgggcggccagtggcattaataggcagatggttagccatgtcttgaaaaatggtcgcattaggcgtggctcttttaggtttgcgcgcaactttataacagctttttatggcgttttcaggccgtttgtcgactgaaccctggggtcaaattcaggaaaaacgcgactaattgccgcaattgtcctacagaagtcaggtggcataaggctttgcgggaaggaagataccattggccgtacgtcgggcgcccgtaaaaaagtcacaaagaaaatgaaaaaatttatctatcgaggcaaaagaggtccttcatgaacacctatcgacaggattattccgggcaagatacccacagcaaggtaatcggttacctgctctggattttcggttttaccggggcgcatcgcttctattacggcaaacccgtgaccgggacgatctggtttttcaccttcggtctgttcggtattggctggctgatcgacttgttcctgatcccggccatggaccgtgaagcggacctgcggtttaccgctggccccatcgaatacaacgtggcctggatcctgttggcgtttctcggggtatttggcgtgcaccgcatgtaccagggcaaatggatcaccgggctgatctatctgctgaccggcgggttgttcctggtgggggtgctgtatgacttctggacgttgaatacgcagatttcgatccgcaatgccgagcgcaatgccggtcgatagggcaaaaaaatcaaatgtgggagccagctcccacattgtttattgtgcccgctttaggcctggtagctgatccgcccgtccaccaacgtgtagcgcaccgtcgccggcaggctatgcccgatgaacgggcagttttcacccttcgacagccactgctccccggcaaccgttgaactgcccaagtcgaacagcaccaggtcggccgccgaacccaccgccaacttacccgcaggcaagcgcagcgcctgggccgggcccgcgctcaggcgcgtcagcagcgtcggcaaatccagcaaaccgtcctccaccagcgtcatcgccagcggcagcaacagctcgacgctgctgatgcccggttctgtcgcaccaaacggcgccagcttggcatcgcgctcatgaggctggtgatggctggaaatcgccgacactaccccggatttcaccgccgcgcgcaaaccgtcacggtcggcgcgggtgcgcagtggtggttgcacgtggtacaggctggagaagtcgatcagcgcctcatccgtcagaatcagctgatacagcgccacatccgccgtcaccggcaggccgcgagcctgggcctgggcgatcagggccacgccgcgcgcgctggtcagttggctgaagtgtgccctcacgccgctttgctcgaccagcaacaggtcgcgggccaacgccacggtttcagcggtttccggaatgcccggcaaacccaggaaactggcgaccgcaccttcatgagccaggccgccttcggccaggtcgcggtcctgggagtgaaagatcaccgtcaaatcgaaagtggccgcgtattccagggcgcgcaacagggtgcgggtgctgcgaaagctctccaggccgttgccgaaagccacgcaaccggcgtcgcgcagggcgatcagctcggcgagttgttcgccttccaggcctttgctcagcgcgccgataggaaacaccttgcaattgccggcttcgcgggcgcggtcgaggatcagctcggtcacggccgaggtgtcgaggatcggtttggtgtggggcgggcagcacaggctggtcacgccaccagccgcggcggcgcgggtttcactggtgatggtgcctttgcggctgtaacccggttcgcgcaaggcaacgttcaggtcgacgaggccaggcgcagccaccaggcccttggcgtcgatggtctcgctggcgctgaaacccgcgggcgcagtcccgatggcaatgatcttgccggcttccaggtgcagatcggtaacttgatccaggccgctggccggatcgatgactcgggcgccgagaatgctgagcttcactgggcgttctcctgctcgaattgacgttgcgcggtttgcccgctcatggccatggacatgaccgccatgcggatcgcgatgccgtaggtcacctgattcagaatcaccgactgcgagccgtcggccactgccgactcaatttcaacgccgcggttgatcgggcccgggtgcatcacgatagcgtccggtttggcgccggccaggcgtgcggtggtcaggccgaacaggcggtagaactcgccctcgctcggcagcaggccgccggccatgcgctcgcgttgcaggcgcagcatgatcactacgtccacatccttgaggccttcggccatgtcggtgtaaaccttgacgccgtattgctcgatgccgatcggcagcagggtttttggcgcaatcacgcggatgtccgggcaacccaggactttaagggccagcatgttcgaacgcgctacccgcgagtgcaggatgtcgccgacgatggccaccgagaggttttcaaagctgcccttgtgccggcggatggtgagcatgtcgagcatgccctgagtcgggtgggcgtggcggccgtcgccgccgttgatgatcgccacctgcgggcacacgtgctcggcgatgaagtgcgcggcgccggagtcgccgtggcgaaccacgaacatgtcggcggccatggcttccaggttgcgcagagtgtcgagcagggtttcgcccttgctcgccgacgaggtggagacgttcagcgtgatcacgtcggccgacaaccgctgggcggccagttcaaaggtggtgcgggtgcgggtcgagttctcgaagaacacgttgcagatggtcttgccgcgcagcagcgggaccttcttcaccgcccggccaccgacttcgaggaacgagtcggcggtgtcgaggatttcggtgagcagttcgcggggcaaaccgtcgagggacaagaagtgttgcaactggccctgagcattgagctgcagcgggcgcttggcatctagaggcgtcatcgcggggactctttacaaggcggtttaaagggcgaggtcttgcagttcgagttcgagcggcgttggaccggacaattttacccgctggtggggtgcaagcgacagtgtggcgccgaccacatccgggctgatcggcaattcaccggcgtccaggtccagcaggcacaccagggtcacgctggcggggcggccgtagtcgaacagttcgttcatggcggcgcggatggtgcggccgctcatcagcacgtcgtcgatcagcaccaggtgctggccttcgatctcgaacggcagggcagatggacgcacttgcgggtgcagaccgttctggctgaagtcatcgcggtagaaggacacgtcgagggtgcccaatggcgagtcgctgcccagcgcttccagcagcgcctgggccacccacacaccgccggtgcgaatgccgatgaagcgcggctcgctgatgttgcggtgttgcagatgggccgtgaggcttgtggccatctggctgatcagttcggtggggttcggcaggctcatgcaggctccttcaggaccttcgcgcaggcaaggtccgggctcaaacgtaaaaagacgcggcaagccgcgtcagtcaggattcaaataaagcggtgttttcatccagccaaccctgcaacaacaaggcggcggcgatggcgtccacggggttgtcgcgatagctgcctttctgcccgccacggtcacggcgctcacccttggcttcaaaggtggtcaggcgttcgtcgtgcgtatagaagggcaggttatagcggccattgaggcggcgggcgaatttctcggcgcgcaggcacatgtcgctgggggtgccgtccatgttcaagggcaggccgaccaccacggcgtcgggcttccactctttaatgagggcttcgacctggttccagtccggcacgccgttctgggctttcaaggtacacagttcgcgggcctggccggtaatcacctggccgacggcgacgccgatctgtttggtgccgtagtcaaaacccaggatcaaccgcaaggccatcaggcgtgccccgcctggctggtcagcaggctgaggttgacgcgcagcttggcagcagcggcttccaggcgcagttcgctgggggtgttgaacaggatggccgcgtcgaacgggcaggtcagccaggcgttactcgccagttcagcttccagttgcccggcttcccagccggcatagccgagggtgatcacgctttgctcggggcccacaccgtcggcaatcgcgaacagcacgtcctgcgaggtggacagcgatacgccttcaaggtcgaccgtggcctgaaatttcggcccggtggggtgcagcacaaaaccgcgatcggtctgcaccggcccgccgatgtagatcggcacgctttggcaacgggcgggcggatcgacttccggtcgcaactgctcaaggatatccgccaggttcagctcctgcgggcggttgaccaccaatcccattgcaccattggccgtgtgctcgacgatataggtcaaggtttgcgcaaagttcgggtcggccatatggggcatggcgatcaggaattggtgcttgaggtaggtcgggctgacatttttcatgtccactagtgtggcggtggaggggcgaactgacaagcctgatcatctgtaggcatccgtctgtggcgagggagcttgctcccgctggactgcgcagcaggcccagtttttggggccgctacgcgccccagcgggagcaagctccctcgccacagataaagcagctcttgaggcctcagttgctggacagccgatcacccttggcaaacttccaggtgcggatgatttccaggcgatcgatgtcgttcaggtcgccggtgaagggtgcgaaaggcgcagccaggcgcacgatgcgctgggcggcctggtccagcaacggctggccggatgactcgagcacctgcacttcatagagcgaaccgtcgcggttgatcgacaccaaaaggcgcaaattgccgtaaatctgctggcgccgcgcctcgtccgggtagttgaggttgccgatgcgctcaaccttcttgcgccactcgtccttataccaggcgcctttgtcacgcatggtcgaggccgcgttcaggcggtagatgcgcgggcgcttggcgtacagctgttgttcgttggccagttcggcttcaaggctggaaatctggtcggacaactgcgaactgtcgaaggtcggcgccggcttgacgggctcgggcgtcggctcggtcttggttttctcgcgctgggtcggggctttttgtggtttgggcgcgacggttgtcaccgcagccttgggcgcggcctgcttcacttcgggcttgggcgccggtggcggcgtgactttattgaccttgttgtcctggaagggcgccacttcggtggtcttgggcaccgcctttttgtccagcgtgccgctgccctgctgattgtcctgggcgagaaagtcagctttttcgggctttttttcgctcttgaacgtggcgagggtgatttccagggttttggtgatctgcttgggttcggcaaaggtgaaacccaggccgaggatcaaggcaaggtggatcaacgcggcgagaaacagggtaaatccgagccgatcagccgggcgcacgccgctgtgggagagttcggggggcagttcggacgggagtgtcatgacaaaaaaaccaacatcgcgcgtttcacaggtggcgcatgataacgcaatgttggtgcgtgtccggctgttctatgtcacttggcttgtagcttgcgctcaatggccgccatcagcatttcgccgatgttcgtgccaaatgcgttgtcgatctcgcggatacaggtcgggctggtgacgttgatttcagtgaggttctcaccgattacgtccaatcctacaaatagcaggcctttttcccgcagggtcgggccgacctgggctgcgatccagcgatccttgtctgtcagcgggcgggcttcaccccggccaccggccgccaggttaccgcgcgtctcgcccgctgccggaatgcgcgccaggcagtaatccaccggctcgccgtcgatcatcaaaatgcgcttgtcgccgtccttgatcgccggaatgtacgcctggcccatgatctgctgggtgcccagcgccgtcagggtttccaggatcaccgagaggttcgggtcgccggcgcggtgacggaagatcgaggtgccgcccatgccgtccagcggcttgaggatcacgtcgccgtgtttggcggcgaattcacgcagcacgtcggcgcggcggctgactacggtcggtggcgtgcactgcgggaacagggtggcgaacagcttttcattgcagtcgcgcaggctctgcggcttgttgacgatcagcacgccagcgcgttcggcctgctccagcaggtaggtggaatagacgaactccatgtcgaacggcggatccttgcgcatcaggatcacatcgaggtcggccagcgggctgtcgatctcatctgcaagttcgaaccacttttcagggttggcgaacacctgcagcgggcgcatgcgggcacgggcctcgccgtcgccctggtaaaggtcgcgctgctccatatagaacagggtccagccgcgggcctgagcggccaggagcatggccagcgagctgtcctttttataggaaatgctggcgatagggtccatgacaatgccgacgcgaacgctcatgggggatttcctctagcaaataagggcgcataaaagtggcgtcagagtggcgctgcggctgttgcgggtcaaggaaaaaccaccgggccggttgctcgatagattgcgcccggagactgtgctaaaaagactgccacagcgcagcagcccttgaattccaaggcttgcggcgttcatcctgtgagacatcaggcagtacacaccgaaaaccgattcgctgtggcgatggtagagcagatatggaacagcattccaacgccttgagagtgatggtgatcgacgactcgaaaacgatccgtcgcaccgccgagacactgttgaagaacatggggtgcgacgtcatcaccgccatcgacggtttcgatgcgctggcccggattgttgatcatcacccgcacattatctttgtcgacatcatgatgccgcgcctggatggctatcagacctgcgcgctggtgaagaacaacccggcgttcaaatcgatcccggtgatcatgctgtcctccaaggatggcctgttcgacaaggccaaggggcgtatcgtgggtgtcgatcagtttttgaccaagcctttcagcaaggaagaactgctgggcgcgatcaaggcctacgtgcctgccttcgccgcagtagaacaagcacactgacgccgcctcacaagggctggcgccgaccaatgtagtggggaaaaccatggcacgtgttctgatcgtcgacgattcgccgaccgaaatgtacaaactgacgggcatgctggaaaagcacggccatcaggttctgaaagccgaaaacggcgcggacggcgtggccctggcccgtcaggaaaaacccgacgccgtgctgatggacatcgtgatgcccggcctcaacggcttccaggccacccgccagttgtccaaggaaccggaaaccaacggtatcccgatcatcatcatcaccaccaaagaccaggaaaccgacaagatctggggcgcgcgccagggcgccaaggattacctgaccaagccggtggacgaagaaaccctgatcgccaccctgaacaaggtgctggccggctgacggcacgccatcatgaccgagtcgcaaaccgctttcgagctgctgctggatatcgaccgccgctgccgcctgctggccgccgacctgccgtcccaggaaacccgcctgcaacgctggagcggcatcggctttcgcctggggccgcatctgtatgtggcgcccatgggcgaagttgccgaggtgttgcacgagccgcgttgtacgttgatgccgggcgtcaaaccctgggtcaaaggcgtggccaacctgcgtgggcgcttgctgccggtgatggatctgggtggttttcttggcttggaactgtcccgcgcgcgcaaacagcgacgggtgctggtggtggagttcgatgacctgtttgtcgggctgttggtggacgaggtggtgggtatgcagcatttcgcacaagacgcactgttgacgaccgccgcccccggcacgccgtttattcaggggcgcttcgacggcgacccgctgtggcaggtcttcagccccttcgctctggcccaggccccaggcttcatggacgttgccgcatgaccaccgtcaccccgaccaaaccccaggccgcgtcgcgcagccgttcgcagatcatcgtgctgtttatcgcgttgatcgtgttcatcatgctgctgttcgccaacttcgcctacctcaacacccagtccacctatgacaagcagtacatcggccatgccggtgaattgcgcgtgctgtcccagcgcatcgccaaaaacgccactgaagctgccgccggcaaggcggccgcgttcaagctgctgggcgatgcacgcaacgacttcgcccagcgttggggttacctgaaaaaaggcgacgtcgaaacgggcctgcccgccgcgcccaatgcagtgcgcgccgaaatgcgcgccgtgcagaccgactgggaggcgctgctgaaaaacactgacgcgattctcgccagcgaacagaccgtgctctcgttgcaccaagtggccgcaaccctcgccgaaaccgtgccgcaactgcagatggagtcggagaaggtcgtcgacatcctgctgcaacgcggcgccccggccagccaggtggcactggcccagcgccaatcactgctggccgagcggatcctcggcgcggtgaacactgtgttggccggcgacgaaaccgccgtgcaggccgccgacgcctttggtcgcgatgccaaccgcttcggccaggtgcttaacggcatgctccagggcaaccccggcctgcgcatcagccaggtcgaagaccacgacgcgcgcgcgcggctggcggaaattgccgagctgttcgagtttgtctcaggctccgtggatgaaattctcgagacctcgccgcagctgtttcaggtgcgtgcctcggcgagcaatattttcaacctgtcgcaaaccctgctcgatgaagcctcgcacctcgccaccggctttgaaaacctcgccagcggtcgcagtttcgacaccatcggcggctacgtgctgggcctgctggcgttgacctcaatcatcctgatcggcctggtgatggtgcgcgagaccaaccgccaactgcatgaaaccgccgagaagaatgagcgcaaccagaacgcgatcatgcgcttgctcgatgaaatcgaagacctggccgacggcgacctcacggtgacggcctcggtgactgaagacttcaccggcaccatcgccgattccatcaactattccgtggatcagctgcgcgacctggtggccaccatcaacctcaccgccgggcaagtcgccggtgcggtacaggacacccaggccaccgccatgcacctggcccaggcttcggagcatcaggcccagcagattgccgaggcgtccaccgcgatcaaccagatggcccagtccatcgatcaagtgtcggctaacgcggcggaatcctcggcggtagcggagcgctcggtggaaatcgccaacaagggcaacgaggtggtgcacaacaccatccacggcatggacaacattcgcgaacagatccaggacaccgccaagcgcatcaaacgcctgggcgagtcatcccaggaaatcggcgatatcgtcagcctgatcgacgacattgccgaccagaccaacatcctcgccctcaacgccgcgatccaggcgagcatggccggggatgccgggcgcggttttgcggtggtggcggacgaagtgcaacggctggccgagcgctcatcggcggccacgcggcagattgaaaccctggtgcgggcgatccagaccgacaccaatgaagccgtgatttccatggagcagaccaccaccgaagtggtgcgcggcgcgcggctggcccaggatgcgggggtggcgctggaagagattgaaggcgtctcgaaaaccctggcggcgttgattcaaagcatttcgaatgcggcgcagcagcaaacgtcatcggcggggcagatttccttgaccatgaacgtgattcagcagatcacgacgcagacatcttctggctcgactgcgacggccgagagcatcggcaacctggcgaaaatggccagccagttgcgcaggtcggtgtcgggtttcaccctcccgccacccaagcaagtcgatgattgaaatgcaatgcagctgtgggagctggcttgcctgcgatagcgatctcccagcgggcacatgtatagctgacccaccgctatcgcaggcaagccagctcccacattggatctctattcagtttgagatccatgcaacaccagcaacccacgaattttaagcggagcagttatggttgatcggcacgactacgtggccctcgaatgggtcaagggcgacattgccgaaaccctgaaacaggcccgttcggcgctcgacgcctatgtcgaaacaagcgacggcgacgccatcagcgagtgcctggccggtgtgcaccaagtgcatggcgcgctgttgatggtcgaattctacggtgcggccctgctcgccgaagaaattgaagaactggcgctggccctgcaagccgggcgcgtcagccagcgcgatgaaagcattcgcctgctgcaacaagccctcaaccaactgccgctgtacctcgaccgcgtacacagcgctcgccgcgacctgccgttggtggtgttgccgctgctcaacgacctgcgcagcgcgcgcggtgaaagcctgttgtccgagaccagcctgttcagcccgcaactgctgtcgattgagccgttgcccgatgaggtgctggcgcaacgcgggtctcctggcctgcacgaacaattgcgccagtggcaccagctgctgcaacaagccttggccggtttactgcgcgaagaccatggcccgagcaacctggaagacatggcacgggtcttcgcgcgcctcgaggcgctgtgccagggcgcgccgttgctgccgttgtggcaggtcacctcggcgctggtcgaaggcatgctcactggcgtaattgccaacagcccggcgttgcgcagcctgctcaaggccagcgacaagcagctcaagcgcttgctcgcccaaggcattggcggcatcaaccagcctgcgccggatgaattgctcaaaagcttgctgttctacgtcgccaaagtcacccggccgacgccgcgcatgcaaagtttgaaagaacgttacggcctggatgaagccttgcccgacagtgccgtggtcgacgccgaacgcgcgcgcctggccgggccggaccgtaacgccatgggctcggtactcggtgccttgtgcgaagaactggtgcgggtcaaagagcgcctcgacctgttcgtgcgcagcgaccgtcagcacactcacgacctcgacgccttgctcgcgccgctgcggcagatcgccgacaccttggcggtgctgggtttcggccaaccgcgcaaagtgatcatcgatcaacttgccgtggtgctgagcctggtgcaggggcagcgcgaacccaacgatgcggtgttgatggacgtcgccggtgccttgctttacgtcgaggccacgctggccggaatggtcggcaccgtcgagccggagagccgcgaagaaagccgcctgcctaccactgacctgacccagattcaccaactggtgattcgcgaatcctgccaatgcctgcggcaagccaaagaactggtgatcgattgcgttgaagccgattgggaccgccagcgcctggaatccctgccggaactgctcagccaggtacgcggcgccctggcgatgattccgttgccacgggcggcgagcctgatgcgcggttgcaccgattacgtcgatgaacagttgatggccagcgaagttgcgccatcgcaggtgcaactgggccactttgccgatgtgatcagcagcctggaatattatctggagcgcatgcttcaagaccccgacgctgcgggtgaaaaagtcctggaactcgccactcagggtctcgccgcgctgggctatctgccggccgagaaaccttggcgccaggcgttggtggcaccggagggcgtattgtccaccgaccttgcgcccagccagtcgcagttcgacgcattggccagccccacctcgcgcctcaacccaccggcgttggtccgtcccggcagcctgctgccgccaccgaccggtgaagaacccatcgacgacgaactgcgcgaagtcttcctcgaagaaaccgatgaagtcctcgacgtgctgcatcgcaacctgcccaacagcgccgacaagaccgcccagggcgaaatgcgccgcgcctttcacaccctcaaaggcagtggccgcatggtgcgtgcgctggtgctggccgagctggcctgggccgtggaaaacctgctgaaccgtgtgctggagcgcagtgtgaccctcggcgccgaagtgcagcaggtgctggatgaagccgtggccttgctgccggaattgattgccgacttcgccatcgacgaccagcgccagcgcgatgaagtcgacgccctggccgcccgcgcccacgccttggccagcggcactcatgcctcggctgacgaaccccacgacccgatgttgctggaaattttccgcaacgaagcccagagccacctggaaagccttaaccacttcctgcagcaggccgccgaacacgtgccgctgcaagtcagcgatgaattgcaacgcgccctgcacacactcaagggcagcgcctacatggcgggcgtgctgcccatcgccgagctggcgcggccgctggaccacctgacccgtgagtacaaggcccaccgcctgccgctggacctggacgaagtggagttgctgctggaagccgaaagcctgttccagcgcgggctgcgggatctggacagcgatcccctggcgccgatcaaaggcgccgaggacctgatcctgcgtacccaaggcctgctcgacagccagctccaggcgttgctcgacgcccccaacacgggcttgcgcatcaagcgcgacccgcagttgatcgccaacttcctcgcccagggcatggacattctgctcgacgctgaaagcctgttgcgccgctggcagcaacaccccggcgagcgccaggaactgactgcgctgctggatgagctgaccacactgggggagggcgcgcacatcgccgacctgcacgccattgacgaactgtgcgaagccttgctcgacctgtatggcgccgtggaagaaagcagcctggcggtcagcgagcgattcttccatgaggccgaacaggcccatgaagcgctgatcagcatgctcgaccagttggctgccgggcaggagatcagcccggcgccggcgcgggttgaagccttgcgcgaactgttggatgaagcgttggacccgtccgcgaccggcctgatcaaaagcgatggcagccgcgcgttgagcatctctgagctgggtgccgccacggcacagctgggccatgaaacggcgatggatgacgagatcgtcgagatctttctcgaagaggccgtcgatatcctcgacagcgccgggcagtcgctcaaacgctggttgctggaccccgataacccggcgccgctgtcgtcgttgcaccgggatttgcacaccctcaagggcggcgcgcgcatggccgaaatcggcccggttgccgacctcgcccatgagctggaatgcctgtacgaaggcttggtggaccggcgctacagctactccgccgagttgtcccaagtgctgatggccagccatgaacacctggccttgcagttggatgagttgcagaatcaccagcctttgagcgacagcaccgaacaggtcgccaaggtgcgcgcattgcgccaaagtggcaccccgacgacaccgattgcggcgcccgagacccaaggggccgaccctgagttgctggatatcttcctcgaagaagccgccgatatcctggacagctccagcagcgccttgcagcgctggcaggccgagccgaacaaccgccaggaagtcgaaaccctgctgcgcgacttgcacaccctcaaaggtggcgcgcgcatggtcgaaatcgcgccgattggcgacctggcccatgagcttgaatttctctacgaagggctgtccgccggtttgctcgcgccgtcgcccgagttgttcgcgttgctgcaaggctgccatgaccgcctcgcgcagatgattgacgcggtggcggacggcttgccggtaggctcggtggacaagctcatcgaacgcatcaaaagcctggtgcatccgggcgatgaaccggtaacgcccgtagcattgcctgtgaacaaggccgaggcggcggttgaccccggcgccgacatggtgaaaatctccgccgacctgctggatgatctggtcaacctggcgggcgaaacctcgattttccgtggccgcatcgaacagcaggtcaacgacgcccgtattgccctcaacgaggtggaaaccaccatcgagcgcatgcgcgaccagctgcggcgcctcgacaccgaaacccagggccgcattctcagccgtcaacaggccgaggccgagcgcctgggttatgaagaattcgacccgctggaaatggaccgccattcgcagctgcagcagttgtcccgcgcgctgtccgagtcggcctccgacctgctcgacctcaaggaaaccctcgaccgccgcaacagcgatgcgcacaacctgttgcagcagcaggcgcgtatcaacaccgagttgcaggaaggcctgatgcgcacgcgcatggtgccgttcgagcgcatgttgccgcgcctcaaacgcatcgtgcgccaggtggcgcaagagttgggcaaggacgtggaattcattgtcggcaacgccgaaggcgagatggaccgcaatgtgctcgaacgcatggtggcgccgctggaacacatgctgcgcaatgccgtcgaccacggcctggaatcgcgcgaggcgcgtttgctggccggcaagccggaaaaggggcggatcacgctggacctgacccacgaaggcggcgacatcattttcgacatgcgcgacgacggcgccggtgtgccgctggaagccgtgcggcgcaaggcgatcaagcgcggtttgctcgaccccaatcaggaaatcagcgaccgcgacgtgttgcagttcatcctgcagccgggcttctcgaccgccgagaaaatcacccagatttccgggcgcggcgtcggcatggacgtggtgcacgaagaagtgcgccagctcggcggctcgatggtgattgattccacgcccggcgccggtgtgcactttcgcattcggctgccgtttaccgtgtcggtcaaccgtgcgctgatggtgcagtgcgcggacgatcaatacgcgatcccgctcaataccattgaaggcctggtgcgtgtgctgccccatgagctggcggggcactatcagcaagacccgccgcgctatgaatacgccggccagcgctatgaattgttctatcttggcgacctgctgcacaccgtcagccgcccgcgattgctcggccaataccagcccgtgccggtgctgctggtgcagtacaacgagcggcgcgtggcggtgcatgtggacgccatggccggcacgcgggagattgtggtcaagggcctggggccgcagtttgcggcggttcagggcttgtccggcgcgaccattctgggcgacggccgcgtggtgctgatcatcgacttgctggcgcacatccgcgcccgccaaccggtgctgccggcggcaacggtcgatgcgccgctgatcctcaacgatccgctgaaaaagcgtccgctgttggtgctggtggtggacgactcggtcaccgtgcgcaaagtcaccagccgcctgctggagcgcaatggcatgaacgtgctcaccgccaaagacggcattgacgccatcgccctgctcgaagaacacaccccggacctgatgctgctcgacatcgaaatgccgcgcatggacggcttcgaagtggcgattcaggtgcgcaacgacccacggctgatgcgcctgccgatcatcatgatcacctcacgcaccggccagaaacaccgcgaccgcgccatggccatcggcgtcaacgactaccttggcaagccgtatcaagagtcggtgctgctggaaagcatcgcctactggagcaagtcccatgcttgaccaccgtacccgtcagctcaccggcctgctgctgccattggccgaccgccacctggtgctgcccaacgttgccgtggccgaactgatcgactaccaacgcggcgagccagccagcgacgcgccgccgtggtatttgcggcaagtgacctggcgggatcggcagttgccgctgatcagctttgaagcggtgtgtggcgaggcgattgtgacgggtgagcactcgcgaatcgtggtgctgaacgcgctgggtgggcggccgacgttgaagttcattgcgctggtgattcaggggattccgcggtcgtacaagctcgatagccaactgagttacgtggacgtgccgctgtgcccgctggaactggcggcggtgcaggtgggcgagcatgtggcgaaggtgccggatttgatggggctcgaagccctgctggtcgaatccggcctggcctgaccctaagccttgtggagatctcatgtgggagctggcttgcctgcgatagcgatctgtcagttgaagcttccctggctgacccaccgccatcgcaggcaagccagctcccacatttggtcctgtgcgcctgtcaggttaagcgatcgaatgtctgaatgtggtggagttgctgtaggcgagttctgtatctgggctcagtgggatgttccgtccctggtgaggtgctaggttctgcgctcctcactgccagcaaggactcgcaaatggccgtaccgctaatgccgcccggtgtttcaattctcgaaaatatgacgacagccaagtgcaagagtgcccatctcaagtcaggctcggcattcgcttattcctggttctactctcaggtcagggctgccgggccatggaattacaagaagcgggggcgtcagtacgaggcttttggtaacttcaattacggtgccgcgggtactgtgctgggaattcccgagcgtgtgttgctgcgagccgcgggtgtagctcaaaccgccgcaaagactactcggcctgattttggagtctggtggggcggtgaccctttcggtgatgacccgcgtgaccaatattggataaggaggggtattgagtatgcaatttctcaaggccattaaggcgctcttacccatgctgcgaaatggtttgctggtggtttgcctgatttacatcgggggcaactggatcatgtcatccggtacaccggacctcgacgaagtggtgttgaaacactctttggggaacggcacctcgatctatggggcgcgagatagccagggcggtgccacggtgggcttttcctacagatactacgtccatgaagacctggggagtgatcaggagatacttactgcattggtgtctgcatatccctttctgaaaacaaaagagcccgatgtgcacgtgactaaggacggtggtgttttgcatttcgctattcatgggcgagtgtatgagtacagcagctatggcctcgaaggacttggggttgtgaaggtggaaatgactttgtaatgatcgttcccacgttttcacgtgggaacgatcaaggtgggggcgcgtcggatttttcctgcaagatttcgcgctgtgcatgaacttgttgcgggcagtcatggcggctagtcttcgccccgtcatcgcaaaaaacggtgacacggacgtgcaagtccggttacatgtcggcgcaccagcgcccatagccattcaacgggcgttttttatgcctgctgtatttgttatggcggctgtgcgtgggagatccttcggggtctgccggggtccgatatgcccggtcttgcacacctgcgcacagctgccaccttatttgcgtgcaagcggatgagggcagtctccatcacatatcggagctgtaaatcatgattaaaaaacctactcctaatccgcccctcttcaccgttaacccccaccagaacaccgagaccctactggccaacgccagcgaaaccttgtcctcgctaaacgccttgacctgcaatctggccttcgacctgagcacctcccagcgcgcaatcatgctcggcatccagcaaatggccgagttgtgccagttactggtcgatagagcgctggaacaagtcagcccttcgccagaaggttgagcgggtctcaaacatggactgatcggtccctgattgggaccgatatccagagaacaccaccgaacaaatgtgggagctggcttgcctgcgatagcgatctgtcagttgaagcttgcttggctggcccaccgtcatcgcaggcaagccagctcccacatgaggtttgtacatctggctaggggcgtttcaccacagaacacttgatcgttcccaaaaagggacctatcgttcccttttggggactctttggccgctgccatgcaaaccttgccactcagcactgcactcttcaccgtgacccagcaaaaagtgctgggtctgctgttcggaaagcccgaccaaagcttttttaccaatgaaattgcccgctgggccaacgtcggcaagggcagcctcacccgcgaactggagcgcttgcagttggccggcatcctcagccagacacgccaaggtaatcagacccactaccaagccaacccccagtgcccgatctactcggaattgctcgccatcgtgcgcaaaacgctgagcctggacgagcctttgcgcaatgcattggcgccattcgccgaacggctgacctgggcttttatctacggctccatcgcgaagggcgaggcgcactcatccagtgacatagatctaatgttgatcggcgaaagcctcaactacagtgacgtcatggagcagctcatgccgcttgaagagcaactgggccgcaccatcaacccgacgctgtacgcccccgaagactggattggcaaatggaatgccgggaacagttttgtgcagcgggtggtgcagcaggacaagatcaatctgattgggggcaaccccctggaagccaaggatggacagcaaggcaaatctggagaatctgcaacgtagtggcggcctgaaggctgagccgccggatcgcaaggaatgtgatgggctgatgcgctcggccagggaccggttgaaggatgccaacacgcccctgctctcgtttgccagccggttcgacctggcttacaacgccgtccatgccatcgccctcacagccttgcgtctgcaaggttatcgctctgacaaacgctatctggtcttccaatgcctgatccacactcttggcgcgagcaaggtgcaggtaaggttattggtgttgtgtcatgagcgtcgaaacctggcggaatacgaagggtatatggatgaggatgaggcgctgctggggcagttgatgatggttgcgcagactttactgatcagtgtggaagacttgctcgcgggtcgtggctggtaataagcgactggaactcgtcaccgatcaaaatgtgggagctggcttgcctgcgataccgggctgtcagtcgacaatttcatagctgacccaccgccatcgcaggcaagccagctcccacatttttaatcttcgttcggcaaaagtccgtgtttgctgacggtccgttactgcaaccgtaacgatccgccgccgtgcttgattgatgcccccctgattcactcctaaggtaagcccacgacaccaaccccgtggagccaccatgacaacacccatcacccccgactcgcgctggacgcggcggcgcgacgagaagcagcggcggctcgggctggtcaaacactttgcagacggggcggtgcttccgggcgacaagatcgtcgaggcgctggaagccctgattctcccaggcgaccgcgtggtgctcgaaggcaacaaccagaaacaggccgatttcctctcgcgctccctggccaaaaccgacccggccaagctccacgatttgcatatgatcatgcccagcgtcggccgttccgagcacctggacctgtttgaaaagggcatcgcgcgcaagctggatttctctttcgccggcactcaatccctgcgcatcagccagttgctggaagatggcctgctggaaatcggcgcaatccacacctacatcgaactctatgcgcggctggtggtggacctgatccccaacgtggtgctctccgccggtttcatggccgaccgcgcgggcaacatctacaccggcgccagcactgaggacaccccggcgctgatcgagcccgcagccttcagcgatggcatcgtgatcgtgcaggtcaaccagttggtggacgacgtgtccgacttgccccgcgtcgatatcccggcgagctgggtggattttgtggtggtggccgacaaaccgttctacatcgagccgctgttcacccgcgatccgcgccatatcaaaccggtgcatgtgctgatggcgatgatggcgatccgtggcatctacgaaaaacacaatgtgcagtcgctcaaccacggcatcggtttcaacaccgccgccatcgagctgatcctgccgacctacggcgagtcccttggcctgaagggcaagatctgccgcaactggaccctcaacccgcatccaaccctgatccccgccatcgaaagtggctgggtcgaaagcgtgcattgctttggcaccgaactgggcatggaaaactacatcgccgcgcggccggacgtgtttttcaccggccgcgacggctcgatgcgctccaaccggatgttctgccaacttgccggccagtacgcggtggacctgtttatcggcgccaccctgcaagtcgacggcgatggtcattcctccactgtcacccgtggccgcctcgccggttttggcggtgcgccgaatatgggccacgacccgcgcggtcgccgccatggcaccccggcgtggctggacatgcgccacgacgacgcgccgcaagctttgctcgaacgcggcaaaaaactcgtggtgcagatggtcgaaacctttcaggaaggcggtaaacccacctttgtcgacaccctcgacgcggtggaagtcgcgcgcaaaagcggcatgccgctggcgccgatcatgatctatggcgacgacgtgacccacctgctcacggaagaaggcatcgcctacctctacaaggcgcgctcgctggaagagcgccaggccatgatcgccgccgtcgccggcgtgaccgccatcggcctgcgtcacaacccaaaagacaccgcgcgcatgcgccgcgaaggcctgatcgccttgcccgaagacttgggcatccgccgcaccgacgccacccgcgagctgctggccgccaagagcgtggccgacctggtggactggtccggtggcctgtacaacccgcccgccaagttcaggagctggtaaatgcgcgctctcaaactgcatgaactcagcctcgcggatcgcctggccgacttggccgtcgatgcgttgatcgacgaggccgacctgtcgcccaaacccgccctggtggaccgtcgtggcagcggcgcccacagcgatttgcacctgggcctgatgcacgcctcggcgctgtcgctgtggccgatgttcaaggaaatggccgaagcggcgattgaattcggtgaggtgggcttacccctgcgcgaagccctcgggcgcattggtcgcgaaggtgaacaggcaatgctcgccaccacccacggcgtgaatacccatcgcggtgctatttgggccctcggtttgctcactgcagctgcggccctggaacctcgcgcggtcacgctgaatgcggcaaaactggcgttgcttaacgaccgctacgcgccccaacccatgagccacggcgcgcaggtcgcgcaacgctacggcgcacgcggtgcccgtgaagaagcccagctcggttttccgtcggtggtgcaacgcggcctgccgcaattgcgcaaaagccgccggcaaaacagcggcgaacagaacgcccggctggatgcactgctcgcgatcatgaccgagctggccgacacctgcgtgctctaccgcgcaggccctgaaggcatcagcgcgatgcaacagggcgcccaagctgtcctcgacgccggcggcagcgccaccctcgccgggcgccgccaattgcacgaactcgaccagcaattactggccctgaatgcctcccccggcggcgctgccgacctgttggccgcctgcctgtttatcgaccgcctcgacggagcgttttgatggaaaccttatcctttgaattccccgccgggcagccgcccaaaggccgtgcgctggtgggttgcgtcggctcgggcgaccttgaagtactgctggagcccggcacgcccggcacgctgaccatccaggtgcagacttcagtcaatggcgccgagcaacgctggcagcacctgttcgaacgcatgttcctggagcagacaccgcccgccctgaacattgatattcacgatttcggcgccacccccggcgtggtgcgtttgcgcctggagcagggtttcgaggagatcggccatgactgacttgctcagcaaacacagcttcgtcgaactcggtgcgcggcaacgggccaaggcgctgctggacgctggctcttatcgcgaactgatcgacccgttccaacgcgtcatgtcgccgtggctcagccgccagggcgtggtgccgcaggcagatgatggtgtagtgatcgccaagggcagcatcgacgcaaaacctgtggtcatcgccgccatcgaaggcaattttcaaggcggcagcctcggtgaagtgggcggcgcaaaaatcgctggcgcactggagttggcggctgaagacaaccgtaaaggcatccccacgcgcgccgtattgctgctggaaaccggtggcgtgcgcctgcaggaagccaacctgggcctggcggcaattgccgacatccacgcggcgattgtcgacctgcgccaataccagccggtgatcggcgtggtggcgggcagtgttggctgctttggcggcatgtccatcgcggcgggcctgtgcagctatctggtcgtgactcgcgaagcacgtttgggcctcaatggcccgcaagtgatcgagcaggaagccgggctggacgaatatgactcccgcgaccggcccttcatctggagccttaccggcggcgagcaacgcttcaacagtggcctggccgaccgctatgtggcagacgatgtggcgcagattcaacagaccgtcaccgaattgctgcaacaaggtttgccgacccaacaacgcagccgccaggccgatttctacctcgcacgtttggccgagctcgacgcctcgccacagatcgacccagccacggtgcgctcgctgtatcaaggagaacgctcatgagagggttgcagtggttcaacgcattgagcgccggcgcaacgcccgttgaaggtttgccggcttccctgaaagtcgccgatggcgtattgggcgaacaggcggtgcgcttcatcgccgtggtcaccgacccgcaaaaccgctttccccgcgcccgcaatggcgaggtcggcttgctcgaaggctggggcctggccaaagccgtggacgaggccatcgcccgtggcgacaagcgcccgattatcgccatcgtcgacgtaccgagccaagcttatgggcgtcgcgaagaagccctcggcatccatcaagccctggccgctgccgccgacagttacgcccgcgctcgtctcgccgggcacccggtgattgcgttgctggtgggcaaggccatgtccggtgcgttcctcgcccatggttaccaggccaaccggctgatcgcgctgcgtgaccccggcgtgatggtgcacgccatgggcaaggcctcggccgcgcgggtgaccttgcgcagtgtcgaagagcttgaggcactggctgccagcgtgccgcccatggcctatgacatcgacagctacgccagcctcggcttgctgtgggaaaccttgtcggtcagcaggattgagcagcccacgccggacgacgtggcgcgggtcagtgattgccttttgaacgcgatcaaggatatcgatggccgcgatttgagcagccgcctcggcgctgccaaccgcgcggcttccagccatgtgcgcgagctgctgcgggagcagtggtgaacgcccacgacttgctctggggcatgaccccggcgcacctgcctgccgaggcgccggcctgggcggtggaggcggttggcgccggtcagccggtggtggtgcgtcgcgccatcgccgcgccgggctgtgtggcggttggcgtgcgcgggcggctgcgtgaacagcgtttcgccgccgtgatgccgcaggcgagtgtgctgcgccgcgtcacgccggaagctttgcgcgacattgtttcgttccgggatttgcctgccgtgcgcgcgcttgccgtgttgcggcccgtgctggcgaacaaaagctggggcgtggcgggcagcgcggggtttgaactggcgacgggcatcgacgctttgcatgagcagagcgatctggatttgatcctgcgcacccccgagccgctgacgcgcgccgatgctcaggatttgctggccattctcgacaccgcgccctgcgccgtggacctgcaagtgcaaacgcctttcggcgctgtcgccttgcgcgaatgggccggtggctcgcggcgggtgctgctgaaaacggccagcggcgcgcatttggtactcgacccgtggcaggccgtggcatgagcagccttttggtgtttccggggcagggcgcgcaacggccgggcatgctccagcagttgcgcactgatgtactggatgaagccagtgatgccttgggtgaagacgtccgcacactggattcttcacaagcgttggcgaatacccgcgcggttcagctgtgcctgttgatcaccggcgtggcccacgcccgcctgctgcaacacacgccggattatgtcgcgggcctgtccatcggggcttatccggcggccgtgatcgcgggcgcgctggactttgcggatgcgctgagactggtcagcctgcgcggcgagctgatgcaaactgcttatccacagggctatggcatgacggcattgatagggcctgaattaaccacagtcgaaaagctgctggctgaagtccacagccccgaaaccccggtgtacctggccaatatcaacgccgacaaccagaccgttatcgctggcagtgacgaggccatgcggcgcgttgccgaccgtatcaaaggcaatggcgtcgccaagcgcctggccgtgagcgtgccgtcccattgcgcgctgctggagcaaccggcgcaggcattggcgcaagccttcgtcacgctcaagccaccgcgtatcacctacctgagcagcactcgcgcgcggccgatccacaaccccgagcaattgcgcgacgacctggccttcaacctgtgccgcgtcgtcgactggcgcggcacggtgcaaagcgcctatgagcgcggcgtgcgcctgcaaatcgaactgccgccgggcgcggtgctcaccggcctgtcacggcgtgtgtttgaacaaggcacggtgatcgcctgcgaaggcgcgcgcctggacaccttgcaggccctgctgcaagaggaggagcgccgccaccgataaagcatcacccaaggctttcgaagcacaaaaacaacaatttcgaacgagcactttgaggacaacaaccatgattatttacggtgtggcattgctggcgatctgcatgttggcgggcgtgatcctgggcgacatgctcggcgttttgctcggtgtgaaatccaatgtgggcggagtggggatcgcgatgatcctgctgatctgcgcacgcttgtggatgcaaaagcgcggcggcatgaccaaggattgcgaaatgggcgtgggcttttggggcgccatgtatatccccgtggtggtggcgatggccgcgcaacaaaacgtggtgactgcactgcacggcggcccggttgccgtgctggcggccatcggttcggtcgtagtctgcggctgcaccattgcgctgatcagtcgtacccacaaaggcgagccgttacctgccgaagagccattgattgctgtagcgggagggcgctgatatgtgggcgctcattgataaggggctggaaaataacagcctggtcaccgcctttgcttttgtcggcgtggtgatgtggatttctgtggtgctgtccaagcgcctaacgttcgggcgcatccatggttcggcgattgccatcgtcatcgggctggtgctggcctgggtgggcggcaccgtgaccggcgggcaaaaaggcctggcggacatggcactgttctccggtattggcttgatgggcggcgcgatgctgcgtgacttcgccatcgtcgccaccgcgtttgaagtgcaagccaccgaggcgcgcaaggccgggttgatcggtgcaattgcgctgctgttgggtacggtgctgccgtttattgttggcgcgagcctggcctgggcatttggctatcacgatgcgatcagcatgaccaccatcggcgccggtgcggtgacctacatcgtcggcccggtgaccggtgcggcgattggggcgacgtcggatgtgatggcgctgtcgattgccaccgggttgatcaaggcgattctggtgatggtcggcacgccggtggcggcgcgctggatggggctggacaacccgcgttcggcgatggtgtttggtgggttggccgggactgtcagtggcgtgacggcagggctggcggcgacggatcggcggttggtgccgtatggcgcgttgaccgcgacgtttcacacggggcttgggtgtttgttggggccttcggtgttgtatttcattgtgcgtgggttggtcggctgattgtcgctggctttgatggcctcatcgcgggcaagcccgctcccacatgttgatttgtgaatgcattcaagtgtgggagctggcttgcctgcgatggcggtctcaagcatggcggttggcatacatccgacactccgccaacagcgccagcaggttcgggtcgcgttccttggccttcaaaaacaccacgccaatctgctgctgcaaccggtaacggggttgcagcggtatcagcttcacgcggttctcatacaccgccgcaatccttcccggcagcagggcataaccgacacccgagctgaccatgctcaacaaggtgaagatgtcattgacctgcatcgccaccttcggctcgaaccccgcttgcttgaacacacggttgccatcctggtgggtggcgaagccttgggtgagggtgatgaaggtggcgtcgcgcatgtcggcgaggtcgatttgctgttcgcggtcgaagggtgagtctgccggcgtggcgaggaagatgtcatcggtgaacagcgcgatctgctcacaatccgggtcgttggcgcgttcgtcgagggagatgaggatcgcgtcgacttccatgttcttgagcttgtagagcaggtcgaagttggagcccaggatcaggtcgatattgagttcgctgcggcggatcttcaggcccatgatcagttgcggcacggtcttcaccgtgagcgagtacagcgagcccagcttgaagcgctcggctgagaaaccagcggcttcgcgggtcaggcgtacgctgtcgaccacatcggccaccagtttctgcgcgcgttcttccagcacgtaggcgctttccaatggggtgaggttgcggccctcatgcttgaacaacgggcagcgcagggcgttttccagggagtggatggcgcggtgcacgctgacgttgctggtttgcaactcggcggcggcgcgggccaggttgccggtgcgcatgaacgccaggaagatttccagtttcttgagggtgaattcttcgtcgatcagcatggccgtggctcttgttcgaatgctgtcgattgtgcccctaaaaccagttcactcccagccatgcactgcccaggcccagcagtacgccgacgataatcagccagatcgcgttcagccgcgtgtaatacaccacggcggcgctggccagggtcagcaccaggctggtggtgttgttttccaggctgttcatcaggatgtaggtggaggcgaggatcaagccgatggaaatcggcagcaggctgcgtttgacgcgctgcacccatggtgtttgggtgtgtttttccagccagcccgcgccaaggtaagccagcaccgaacagggcaccagtttggccagcaaggccaccagcgcgcccggcagacccgccgcctgctggccgataaacaccaggaacatgccgttgggccccggtagtgcctgggacagggcgaagaacgcgacgaattgtgcgtcggtgatccagtgcatatccacgacggtgtagcggtgaatgtcgccaatggccacggtgttgccgccaatcgccatcaacgaccacagcgcgcattggatcatcaggtgcaggaggacggtttgcatcagccggccacctttttcggggcgatgaaactcagggccagggaactcgggatactgatcagcaacaccatccacagcggcagcaccagcactgccatcagcacaaaggtcagtacaaaggcgctgtagttcgccacgtttcgcggcatggccttgagcagacgcaacgtggtgccgagcatcaaaccggtggcaatcggcatcaccgcgccgaaaatctgctgcaccacctcatggctccaccacttggcgtaggcgaagccggccagcacggtgatgatcgaggggaacaggtacagcccgcagacggtcacaaccgcacccggcaagccatgcaggcgccggccgaagatgatgccgacgttgccgatattcggcccggggaagaactggccggtggtcagcagttcattgaagccttgctcggtaacccagcgcctgcggtcaaccatcatttgccgcgcccagggcatcacgccgccgaaaccaaacaggccgaccatggcgaagttgtaaaacaactgccacagagtgggttgaggctggtcaggttcgagttcgggcatggagggtaccgatgaggtgcttttatgtgggagcaggcaagccagctcccacaggatgaggcgaatgatctacgggcccgtgtatttgggcaaatgaagaaagggtgttatctgatagcgagtgagtagcgtcagaatgctcaaggtgataacggttattcgaggtgagtgacacatgtatcacggggaacgattcaacgcctggagccatttgctcggggcggttgcggcctgtatcggggcggtatggatgctggtggtggcgagcctggatggcagcccctggaaaatcgtcagcgtggcgatttatggttttacgttgatggtgctgtacagcgcgtccaccgtgtaccacagcgtgcgcgggcggcgaaaagagatcatgcagaaggtcgatcacttttcgatctacctgctgattgccggtagctatacgccgttttgcctggtgacgctgcgcgggccctggggctggacgttgtttggcatcgtgtgggggctggcggtgatcggcattttgcaggagatcaagccacgctccgaggcgcggattctgtccatcgtgatctacgcggtaatgggctggatcgtgctggtggcggtcaagccgctgctcgcggcgctgggcacggcggggtttgtgtggctggcgtcgggcggggtgctgtacaccgtcggcatcatctttttcgccctggaagatcgcttgcggcattcccacgggatctggcacttgtttgtgatcggcggcagcctgctgcattttgtggcgatcatgcattacgtgctgtgacttgtgggagctggcttgcctgcgatagcggtgggccagccaacctcttcggtggctggtatgccctcatcgcacgcaagccagctcccacagtttttgattgggtttgcaaagcaggttagaagtcgccccagagttgttgagcgacggccagcgccaccacgggcgccgtttcagtgcgcagtacacgcgggccgagtcgggcggcgtggtagccggcggcttgggcggtttcgacttctgcgtcagtcaaaccgccttcaggcccgatcagaaataccagcctcgacggcttggcgtggctgatcatcggttcggccaccgggtgcagaaccagtttcaaatccgcgtcggtttgcttgagccagtcggccagcagcagcggcgggtgaatcaccggcactgttgaccgcccgcactgctcgcacgcgctgatcgccacctggcgccagtgcagcaggcgtttgtcggcacgttcgtccttgaggcgcacttcacaacgctcgctgaaaatcggcgttatttcgttgaccccaagctccgtggctttctgaatcgcccaatccatgcgctcgccccgggacaggccctggccgaggtggatgtgcagcggtgattcggtttgcccggcaaagctttcggtcagttgcacggtgacgcgcttcttgccgacttccagcaagctgcccagaaactcctggccggaaccgtcgaacagttgcacggcatcgccttcggtcatgcgcagtacacggctgatgtagtgcgcctgggcttcgggcaactcatggtcgccgatgctcagcggggtgtcggtgaagaagcgggacagtctcatttctgttctctggaaaatacaaaatctgtgggtgcaaaactgactgtggcgcggtttgtctagcccggatcgcggaagtcggggtggaagttttccgggactgccacgctgaccttgctgttggtcgcgatatcgatgccttcgctggccacttcagccaggaagtcgatctgctccggcgtgatcacatagggcggcaggaaatacaccacgctgcccaacggccgcaacaacgcaccgcgttcaagcgcgtgttcgaacaccttcaaacctcggcgctcctgccacgggtaggcggttttagtggccttgtcctgcaccatctcaatggccagcaccatgcctgtctggcgtacctccgacacgtgggggtggtcgaccaggtgtgcggtggcgctggccatgcgctgggccagggccttgttgttttcgatgacgttgtcttcttcgaagatatccaatgtcgccaatgctgccgcgcacgccagcgggttaccggtgtagctgtgggaatgcaggaaggcgcgcagggtcgggtagtcgtcgtagaaggcgtcgtacacatcgtcggtggtgaccacggcggccagtggcaggtagccaccggtcagggccttggacaggcacaggaagtccgggcgaatgccggcctgttcgcacgcgaacatcgtgccggtgcggccgaagcctacggcgatttcgtcgtggatcaggtgcacgccgtagcggtcgcaggcctcgcgcagcaacttcaggtacaccgggtggtacatgcgcatgccgccggcaccctgaatcagcggctcgatgatcacggcggccaccgtgtcgtggttttccgccagggtctgttccatggccaggaacatattgcgcgagtgttcttcccagctcatgccttcggggcgcaggtagcagtccgggctcggtactttaatggtatcgagcagtaacgccttgtaagtctcggtaaacagcggcacatcgcccaccgacatcgccgcgatggtttcgccgtggtagctgttggtcagcgtgacgaaacgctttttgttcggcaggccgcggttgagccagtagtgaaagctcattttcagcgcgacttcaatgcacgatgaaccattatcggcgtagaagcagcgggtcaggccttccggggtcatcttgaccaggcgctcggacaactcgatcaccggctggtggctgaagcccgcgagaatcacgtgttccagctggtcgacctggtccttgatgcgctggttgatccgcgggttggcgtggccgaagacgttgacccaccaggaactgacggcgtcgaggtagcgcttgccttcgaagtcttccagccagatgccttcaccacgcttgatcggaatcaacggtagttgctggtggtctttcatctgggtgcagggatgccacagcaccgcgaggtcgcgttgcatccactggttattcaagcccatcgtcttatctcctcgaagcggtcctggcgtgcagcgcaggcgaaacaatcgcgcaagcctatgcaatgccaggctgtgccacaacccattgcgaccctgaaggatgaattggcagtaaatgcgggacgatctgtcacgtttcttgggaatagtccttaatcgattgttaacgtactgtgcatactctcaagatcatatttctcgatatttcaaagcaaaattttcagctttaattcgatagataaatcgctagtcttgggcacagctcttacgggattgggacatgcagctacgtaattcaaaggcccgctatggttgggtcagcatggtgttgcactggggcgttgccctggtggtgtttggtttgttcgcgctgggcttgtggatggtcggcctcgactactacgacgtctggcgcaaagatgcacccgacctgcacagaagcattggcatcacgttgttcgccgtcatgctggtgcgcatcgtctggcgcctggtcagcccgccgccgccaccgctgaccagttacagtcgcttgacccgtatcggcgctgcatttggccacgcatttctttatctggcgctgtttgccgtgatgattgccggttacctgatttccaccgcagacggtgtcggtatttcggtgtttggcctgtttgaaattcctgccgtgatttccggtctaccggatcaggcagacaacgccggcctggtgcatctgtacctcgcttgggtattggtggtcttcgccggtttgcatggcgtggccgcgttgaaacaccactttatcgatcgtgacgcgaccctgacgcgaatgctggggcgcaaagcctgatgttcaacctcgactcacaaggaatagaaagcatgttgaaaaagactctcgccgctctggccatcggttccgccctgttgtccgcaggcaccgcgatggccgctgactacaagatcgacaaggaaggccagcacgccttcatcgattggaaaatcagccacctgggctacagcttcgttcacggtaccttcaaggactgggacggtactttcagctgggattcggccaagcctgaagacagcaagatttctgtcgacgtgaaaaccgccagcctgtggtccaaccacgcagagcgcgacaagcacatcgccagtaaagatttcctggacgttggcaagtttgccgacgccaagttcgtctccacttcggtcaaatcgacgggcgccaaaaccgctgacgtgaccggcgacctgacgttgcacggcgtgaccaaacctgtgaccttcaaggccacgttcaacggtgaaggcaaggatccatggggcggcgaacgtgctggcttcaacgccaccaccacactgaacctgaacgacttcggcatcaaaggcccgggcccggctgcccagacggcggacctggacatctcgctggaaggtgtgaaggtgaagtaactttcgctgggcacaaaaaaccggatctcgcgatccggtttttttatgcctggaatgcggtcaactgtgggagctggcttgcccgcgatagcggtgtgtcagttgaagcatatttcactgatgcaccgctatcgcaggcaagccagctcccacagaaaagcccatttgattttgcccaggcaaaaaaagccccacatctttcgatgcgggtttttttatgccgcgttaaaactagcggttgcgggtcagcaacgctggtttctcaccacgaggacggcctggcagttggtccaactgctcgggtgtcgggaagcggtccgctttcgactccttgtggatgatcttcggcgccgggccgccgcgcgggttttgcacggctggctcggacgagcgctgttggtcgtcacgggccgggcggcggttgttgctgttgcgcgaatcttcacgacgcgcctgaccatcacgcggtgcaccgttacgcgggccgctgcgcttggctggtggcgttccagtggtgccgccgctgctgttgcgcgggccgttctggcgaccgccctgtggctggccgccacggggtgcgccgcttcctgcgccttgtgccggagcaccggggcggcgaccacggccttgagccggtttggcttgtggcacgtagtcaacgcggttgccgaagttatccacgtcgtcgtcgaggaactcgtccggggcgcggtcggcggcggcgcgtggcggctggctcggctggcgctgttcgcgggccggcgtgccttcacggggcttctgctcgcgggccgggcgttcgccacggccgctgttggcaggcgctttttccttgccgcccttgtctttgcccttgtcgcgacgaccaccgccgccaccgccgccgttcgggccatcgcccttcggaccgcgtgggttgcgcgggttgcgcacgtccgggcgctcgcgcgcttcaggcttttcagcctccacggcgctggcatcgaagcccatcaggtcgccgtcggcgattttctgcttggtcatgcgctcgatgcttttcagcagtttttcttcgtccggtgcaaccagggagatggcttcacccgaacgaccggcacggccggtacggccgatacggtgcacgtagtcttcatcaacgttcggcagctcgaagttgaccacgtgtggcaattggtcgatgtccaggccgcgcgcggcgatatcggtggccaccaggatgcgcacggtgccggccttgaagtcggccagggctttggtgcgtgcgttctggctcttgttgccgtggatggcgacggcggtgaggccgtgcttgtccaggtactcggccaggcggttggcgccgtgcttggtgcgggtgaacaccagcacctgctcccacgcgcctgcggtgatcaggtgcgccagcagcgaacgcttgtggctggcggccagacggaagacgcgttgctcgatacgctcgaccgtggtgttcggcggcgtgacttcgatgcgttccgggttgtgcagcagcttgccggccagggccgtgatgtcctgggagaacgttgccgagaacagcaggttctgacgtttggccggcaggcgggcgaggacctttttcacgtcatggacaaagcccatgtcgagcatgcggtcggcttcgtccagcacgaggatttccacgtgggacaagtcgacgctgccttggccgcacaggtcgagcaaacgacccgggcaggctaccagcacgtcaacaccacgggacatggcctgaacctgcgggttcatgccgacgccgccgaagatgcaggcgctgacgaacttcaggtcgcgggcatacagcttgaagctgtcgtgcacttgcgctgcgagttcgcgggtaggggtcaggaccagtacgcgcggttggcgcgggccgtgacgctgggatttgtccgggtgaccgttggggaacaagcgctccagaatcgggagggcgaaaccaccggttttaccagtacctgtctgagccgcaaccatcaggtcgcgaccttgcaacacggcgggaatggcccgctgttgcaccggagtaggctcggtatagcccgctgcctcgatggcgcggactaaagcctcggagagaccgagggaagcaaaggacatgagtaatcctgttttagttagggcttggcccaaagggataatcttgccgggcgtgaatggcgcttaggggagcgaaatcccgtccggtcctgctgcgtctggcggacactccaccggctcgcgcgggctgaaagctgcgcagtagctgggttgggtgcctttttcaagacctcagcggccgggcgtaagcctggcggaaaggccggagtataacagagcaatcacggcgcgccgctttcctgctgctcaacggtgtgttctgacgctgtaatggcttggattcgaccatatttggcactcaaggcagcgtatgcgggctcctgtttgaagcgtttgagctcggcggcgaagcgttgcaccagcaaatccatgccggcgccacggcgtacggcgagaaattgctgctggcggctgaccacccacggcgcctggctgaccttgccttccaggccaagggccttgatcacatgctggccgacgcggcgatccgtgatcaccaggtcgatgcgacccagtgataatttgccgaagttggcttcgtggctgggcgccggctcgcggttgaacaactgggattcgctgaaggcgtcaccgtacaggtagcccggcgaagtgccgaccgtcaggccgcgcaggtcgtcgagcgcctcgacgggatgcgggcgttcgttggcgtaaaacagtgcaaattcgacttccgacagcggctcgctggggtacagcagcagcgcgtcgcggtcgtggctgtggaaaatatccagcgcgccatcggcgtggccctggtcgagcatcgccaggcagcgtttccagggcaggaattgccagtctacgtctatacccaagcgctggaacacgatcaccgtggtttcataatccagcccgtgcatgctgcctttgtcttcgtagacataaggcgcccaaggctcggtgacaatacgcagtttctcgccgaaagcactgaggctcaggagagtaaaaagcacggcggtcaacaacttgagaatgacgggcatgccctgaggttacgatgctgttgccttaaagagaagctctggcatgcgcattggcgggcagcaagcgctaacagaaaggccctcgtcatgacgagggccttgggcactgcgcgcaaaacctcagcgtggcagcttgaggttgttccagatggcgaggctcggctcggcctggttcagggtgtagaagtgcaaccctggggcgccgccttgcagcaggcgctcgcacatttcgctgatgacctgctcaccgaacgcctggatgctcttgacgtcgtcgccataagcttccagttgcttgcgcacccagcgcgggatttcagcgccgcaggcgtcggagaaacgcgccagcttgctgtagttggtgatcggcatgatgcccggcacgatcgggatgttcacacccatggcccgtacacgctcgacgaagtagaagtagctgtcggcgttgaagaagtactgggtgatcgcgctgtcggcgccggcgttggccttgcgcacgaagttctgcaggtcgtcttcgaagctatgtgcctgggggtgcatctccgggtacgccgccacttcgatgtggaagtgatcgccggtttcttcacggatgaagctcaccaggtcattggcgtggcgcagctcaccgctggccatgcccatgccggacggcaggtcgccgcgcagggcgacgatgcgcttgatgccggcttgcttgtattgggtcagcaggccgcgcaggtcggccttgctgtcgcccacgcacgacaagtgcggagcggcgggaactttgacctggctttccagctgcaacacggtgttgatcgtgcggtcacgggtcgagccgccggcgccgtaggtgcaggaaaagaagtcggggttgtagctggccagctgtgtggccgtggccatcagtttttcatgcccagcatcggtcttggtcgggaagaactcgaagctgtagcgacggtcttgggacatggtcgtatccttggaaactcaaaaaaccggaaggtgttcaccgtcaatgtgggagcgggcttgcccgcgattgcagtgggtcagtcgatacattcttcaactgacctaccgccatcgcgggcaagcccgctcccacacaagcccgctccgacaaggagagagcgggttacttagtagcggtaagcgtgcggcttgaacggaccttcaacggtcacgccgatgtagtcggcctgggtcttggtcagttgagtcaccacgccgccgaagccgcggaccatttccagggccacttcttcgtcgagtttcttcggcaatacttccacggtcaggcgctcggctttctgggctggcgacaggtcggcatacttctggccgaacaggaagatctgggccagaacctggttggcgaacgagccgtccatgatgcggcttgggtggccagtggcgttgcccaggttaaccagacggccttcagccagcaggatcaggtagtcgtcgttctgtgggtcgaaatcgccagcgccggtacggtgaaccttgtgcacctgcggcttcacttcttcccatgcccagttcttgcgcatgaaagccgtgtcgatttcgttgtcgaagtggccgatgttgcagacaacagcgcgcttcttcagggctttgagcatgttcgcgtcgcaaacattgacgttgccggtggtggtcacgatcaggtcgatcttgcccagcagcgctttgtcgatgctcgcttcggtgccgtcgttctggccgttgatgaacggcgaaaccacttcgaaaccgtccatgcaggcttgcatggcgcagatcgggtcaacttcggagactttgacgatcatgccttcctgacgcagggactgggacgaacccttgcccacgtcaccgtagccgatcaccagggcttgcttgcccgacagcaggtggtcggtaccacgcttgatggcatcgttcaggctgtgacggcagccgtatttgttgtcgttcttgctcttggtcaccgagtcgttgacgttgatggccgggattttcagctcgcccttggccagcatgtccagcaggcggtgcacgccggtggtggtttcttcggtcacgccgtggacgcggtcgaggatctgcgggtatttcttgtgcagcagctcggtcaggtcgccgccgtcgtcgaggatcatgttggcatcccatggcgcgccatctttcaggatggtttgctccaggcaccactcatactcttcttcggtctcgcctttccaggcgaacacggcgataccggcagcagcgatagcggcagcggcctggtcttgagtggagaagatgttgcaggacgaccaacgcacttcggcacccagggcaaccagggtttcgatcagcacggcggtctggatggtcatgtggatgcagccgaggatcttcgcgcctttgagcggctgctcagcggcgtacttgcggcgcagacccatcagggcaggcatttctgattcggcgataaaggtttcgcgacggccccaggcggcgagggacatgtcggcgactttgtagtcggtgaaacctgcaggcgtgttgacagcgctcatgaagagcctccattcgtagtgtgcgaatgggcgccgttgtgcgtttagtatccagctggctaaccaggccggacaacgccccatccgagcctgacaggttgaacctgctgcagcgcccctcggacaggtggcgggagaacggtatcaactgaagatgaccgttttgaagcgggggcgattatagccgtgtgcgcggcacttcccaagcctttctgtcggccggatgaagatcgcgcatgggtctgataggcaatggcgcatagaggtcgggcgcgggctctgccatgatgtctcccatcatttcgcaagacgctttggagtgaccatgaacttccacacccgcaaatgggtaaaacccgaagacctcaaccccaacggcaccctgttcggcggcagcctgctgcgctggatcgacgaagaagcggccatctatgcgattgtccagttgggcaaccagcgcgtggtgaccaagtacatctccgaaatcaactttgtcagcgcctcgcgccagggcgacatcatcgagctgggcatcaccgccaccgagttcggccgcacctccattaccctcacgtgtgaagtgcgcaacaagatcacccgcaaaagcattctgaccgtggaaaaaatggtcttcgtcaacctcggcgaagacggtttgccagccccgcacggccgtacagaaatcaagtacgtgaaagatcagttcaccggtgacggcatcagcgaataatcctgtggccggccagtgaacgctcttgacgggcgataggtcgtacctgaacacagcctccgttcaggtaagaccatggccacccaacaagacggcaaaacccccaacctgtcgcaggaagagcaacaggacgtggacaaaaaccagccgccccgtgcggctgtactccatgaaatcatccgcacccagggcgaccaggagctggagcgcaatgtagcggcgctgtggtggtcggcgttggcggcgggtctgaccatgggcctctcgctgatgggcatgggcctgctcaattcgcgcctgccagacggtgagggcttcaaggtgatcgccagcttcggttactgcgcgggcttccttgcggtgatcctggcgcgccagcagttgtttaccgaaaacaccctgaccgccgttctgccggtgatgagcaaacccaccctggccaatgccgggcgcctgttacggctgtggacggtggtgctggtgggcaacctgtgtggcactttgctggtggcttacgtgatgctgcacctgccgatcttcgacaccaagaccgatatggcctttctcgaaatcggccgcaaggtcatggaaaacgatcctgggcaaatgttcgccaaaggcatcatctcgggctggatgatcgcgaccatggtgtggatgatcccgtcgatggaaagcgccaagatgttcatcatcatcctgatcacttacctgatggcgttgggggatttcacccatatcgttgtcggctcggcagaggtgtcctacctggtatttgccggcgaactgccctggaaggacttctggctggtgttcgccgggcctactctggcgggcaatatcatcggcggcagctttatcttcgcgttgatcagccacgcgcagattcgcagtgaaagcagcctgcccggcaaagcggctgcggacccgaggcatccgcagcagatcaacaaagatcagtgatgttcaggtgcggcctggggttcatcccgggtcacgcgcttgaccagcttgccgatgctcagcccctgcaacaggatcgacgacagcaccacaatgtaggtgatgctcagcagcaggtcgcgttccgggcccaatggcagggccagcgccagtgctaccgagacaccgccgcgcaacccgccccacgtcaggatacggatggtgccgcgcggcaccgtgcgccagcggcgcagcagcagaatggccggggccacggtcaacaggcgtgagagcaggatcgccaccgccagcaggctggcagcaaacacatgcagccagttgaacggcaacagcagcaactccatgccgatcagtgcaaacagcagggcattgagcatgtcatcgagcagctcccagaagccatccaggtagcggcgcgtcatgtcgttcatcgccagcttgcggcccaggttgccgataatcaggccggcgaccaccatcgcaatcggcgccgaaacgtgcagttcagtggccatcgccgagccgccgatcaccagagcgagggtcagcatgacttcgatctgatgctgctcgatgctcttgatcatcaggtacaccaggtagccgatcaggccgccgaacaccacgccgccgatggcctcgtgcgcaaacagcatggcagtggcgcccacggtcggggtctcgcccagctgcgcgatgccgagcagcacggtgaacaccaccacggccgtgccgtcgttgaacagactctcgccgacgatggtggttttcagcggtttcgaggcattggcggtacgcagcacaccgagcaccgcaatcgggtccgtcggtgaaatcagcgcgccgaacagcaggcagtacaggaagctcacgtgccagccgaacagggcaaagatgtaatacgccaggctgccgatcacaacggtggcgatcaatacgccgaaagtcgccagcaggccgatgggccagcggtagctgcgcaaatcgctgaggttgacgtgcaaggcgccagcgaacagcaggaatgagagcatccagttcatcagcagatcgccgaagtcgatctggccgatcagttgctgaatacgttcctccaggcccgggtagccgatgaagctcaggccttgcaggatcagggaaaacagcaaggcggtgaccattacgccgatggtgggcggcaggccgataaagcggaagttcacgtaggtgagcagggtggtgaggcaaatgaaggcggcgacaagttcaagcatccggggtccttggaagttggggtgaaacggtcatgattgggggatggaccgcaatagcggcctgatgttgcaaggtttgcgcaaaagcctgatagaacctttccgtatgccgtcgctcatagcgggtgagtgcggcgtgacgttattagtgctaaaactctaacttctgactaaaacgacaaaaggaatcagtgatgacggtcgctttctggtgtgtgttgatcgcaattttcctgccttatctgtgcacaggggtggccaagttcagcggtggcaagttcgggccacggcagaaccacgacccacgtgcgtttctggacaccgtcgagggcgtcgccaaacgcgcccacaacgcgcaactcaacagctttgaagtgaccccggcgtttgcggcggcggtgatcattgcgcacctcgccggtacggcttcgctggtgaccatcaatgtgctggcggtgctgtttatcaccagccgcttgctgtacatcatttgctacctggcggactgggcgatgttccgctcgctggtgtgggcggtgggaatggcgctgattgcgagcttcttttttgtctcgatctaacagttgacgcagaccccctgtgggagctggcttatgtgggtgctggcttgcctgcgatagcatcacctcggtacatcagaaatacctaggtgtctgcatcgcaggcaagccagctcccacattttgatcttcagcgtctgtcaggttccggcgggcgcatccggcacgtgtggcaacgccgcgcctttgggccacagcatccagatttgcccctgctgcttcatgtttcccgccaactcaccagcagcctgaccggtgccccagaacaaatctgcgcgcacttcgccggtgatcgcgccgccggtgtcctgcgcggcgacgggccgtgcgaggggtgaaccgtccggttttgtcgtcgacagccacagcaggctgcccagcggaatcaccttgcggtccaccgccacgctgtagccggcagtcagcggcacattcagcgaaccacgcgggccttcgttgctgtccgggcgggcgctgaaaaatacatagctggggttgctcgccaacagttcgggaatacgttgcgggttggccttggcccaggcgctgatggcccccatggtcacgtcttctttcttcaacgcgccttgttcgaccagccaacggccaattgggcgatagggatagccgttctggtcgccatacccgattcgcagttggcgaccgcctgccagttgaatccggcccgaaccctggatctgcagaaactgcaggtccatcgggtcggtcagccaggcaatcggtttggcgctggagccttggccgttgatggtgctcgcatcgtcataaggcttgagtacgcggccttccaggcggccgcgcaggcgcttgcccttgagttcggggtagatgctttccaggttgacgatgatcaggtcatccggcacgccgtacaccggcacatgagcggtggcggtttcggtcaggcttccggggtagaccggctcgtaatagccggtgatcaggccgtttggcgtgttgtcggccgagcgcaggccgaatacgtccaggcgctccttgagaaaaccgcgcaccgccgcggtattgctcggcacggtggccgccgctgcacaggttgcgccccagatcgggtcggccttcaggcgttggcaggcgctgcgccaggattcaaaaccggccagcaaatcgctgtcggagaccgctggcaacgcttcccaaggtgcactcacataggtggcgacagcatggggttttaccgtttcatctttgccggcgtccttgccgccatcgcagccggccagcagcgcgaacatcggcagagcccacgccaggcggcggctccagggtttcaacgtgactttcatacaaaccattcctgaagcgattgcccgcgtgctgacgctctcgggcaacccttattattaatagggctattggtctttacgggcggggcgaggatactggccgccgtttcccgtgaccttgaagccaccatgacttttaaaagactgaccgctgtattgctggcctgcctgacactgtccgcctgtggcggcgtcgatccgaattcgcccctgggccagcgcaaggcgatcttcaagcagatgctcaagaccggcgaagacctgggtggcatgttgcgtgggcgcattgcgttcgacggcgccaggttcgccgaaggcgcggtcaagctcgatgcgttgtcccatgaaccatggaaacatttcccgagcgtgcgtgaagaagaccacaccagcgccaaagacaacgtatggcagcagcaggcacgctttcaggagctggcgcgcaaccttgaggcggccaccggtgaattggtgatcgccagccaggtccagccttacaaggccagcaacctggggcctgcggtgcagaaagtagaagatgcctgtaccgcctgccacaaacagtttcgcgaccactgaccggttttactggtccagttcttcgacggcgtcttgcagctctttacgggactgcgcgagtttgtctttacgtttgttgatcttgtccgcgtcgccttttttcatcgccttgtcgaggtcggcctgacggcggctgacttcgtgcttggcgtccagcaccttgttttctcgctctttgcgcaaggaggcgtcggtgcagttggcggtgacttcgctcagggctttttccaggccagcttgctgctcgttgttgccgtgggccttggcttgttctatttgggtgctgatggcctggcgcttggcggcgcagccggtgagttgaggggcttcttcggccgccaacaacggcgtggccatgaagcttgcgacggtcaacaaggcaagcggggcgagaaatttcatgtggggctccaaagtcgaaatcgaaaagcagggtgaattctgccaagggtttactgttcatcaggccgggcttgaaaaccgtctataccggccacgcgtaatgtttcagccaaggcctgtacgtgtgggtcgcgaaaaaaagcgctgagttgcgccgcgcgacccgggccgatgccgtcagtggccagccaggcttgggtgtctttggcgaccagcgtctgccagttgccttccaggttgttgcgggccacaggcggtacgcccaaggctttgagccattgtgcaaaggggcgttgtcgcgcgctttgaatgctgtcgagcaatcgggtgcggctgcgttcgccgaagccatcaatgttagcaagctctgccgcatccagggttaaccaatcgagaaagcctgcgatcaggccggcctggatcaatacgttccaggtttcacggcccatgtgcggcaaggcgaggccctggtttccgctgagccaggtcaggcgcgacagcatttgttcttcgcagcccgggtccagttgccagcagctcagggcgtgataggcgcgggcgtcgggctcttgcacctcaacccgtgtggggttgcgcaggatgacctgatccagccttggaatcacctgcccggcaaggctgatggacacttggtcgccggggcggatatccagcgcctgccagcgtttgagcgagccgacgctgacgcggctgatctgccggtcgtccagctgcaccggctccagctccagaatcggggtgatgcgtccggtgcggccgatcttgaaatttaccttgcgcaccagcgccaatgccttggctgccgggtatttccaggcgacggcccaataaggcgtgctgacctgccagcgcttggcgggcgcacgcttggcttgatgcaggacgacgccatcgctggcaaaaggcagggggtggttgtaccagtaagctcgccagcgcgcggcttcggtgatgctctggatggagtggctgtagcgctggctgtcggtgaagcccaggcgggcgagggtggcgaggcgttcgctgaagccggccgggccgtcgggccaagcccagacaaacacgccaatgcccgcagcctctgcgtcgctcaactgcaggcggttcatcagcccggcgaccttgctgcgggcattcagcccaccgttggccgattgcacatgttcgttgaggcgccaatagagttcgccttgcagcaccaggtcgatgggctcgggcagttgctggacgattcccggaatcttgcgcgcggcggctgaccagtcctggccgagcaggccatcgccccggctgatgacctggctcaaacggccccggcgatacaccagggtcaccgccaccccgtcgaccttgggttgaacccatacgccttgccgtgtgccaagccattcggcgacggcggcttcatccagcagtttttgcaggcccgtgtgcgcaacgggatgcggcagcgtaccccgtgaactcgccagtggtttatcggcctgactcaccgcctgaggaaagcattttcgccagcccgcgaggcgttggcgcgcctggtcgtagagttcgtcgctgacgggagagtggccgagccgatggtagctgtcatcccactgcctgatctgttcggcgaggtgggtcatctgggggcgggcctcttcgggacaattgtcggcccacgccaggaatggcagagcgctcagcaaaagagctgtcagtaaacgcatcatgagcatccttgctcgaaaggggcgttcagcctaagtgatccaggcccccacaaaacagtctggtggcccggcgaatttgttagcgggtttctgtaactggcaatgaaaaagccccgccaggcgagccgggcggggctttgtgtaccgtgtgcgtttacaggccggcggcagtgcgcaggtcgttggcgcggtcggttttttcccaggtgaacgtggtgaaggtgtcgccgccgacggtcttctgcgcaggggtacggccgaagtggccgtaggctgcggtttcctggtacatcgggtgcagcaggtcgagcatggtggtgatggcgtacgggcgcaggtcgaagatctcacgcaccagcttgacgatcttgtcgtcgctgatcttgccggtgccgaaggtgttcagcgagatcgacgtaggctgagccacgccgatggcgtaggaaacctgaatctcgcaacgctcggccaggccggcagccacgatgttcttggccacgtaacgaccggcataagccgccgaacggtcaactttggacgggtctttacccgagaacgcgccaccgccgtgacgggccatgccgccgtagctgtcgacgatgatcttgcgaccggtcaggccgcagtcgcccaccgggccgccaatgatgaactggccggtcgggttgatgtggaactgggtgtctttggtcagcagttcggcaggcaacacgtgcttgacgatcagctccatcacaccttcacgcaggtcggcgtaggaaacgtccgggttgtgctgggtcgacagtacaacggcgtcgatgcccacaactttgccgccttcgtaacggcaggtcacctgggacttggcgtccgggcgcagccatggcagcaggccggttttgcgggcttcggcctggcgctgcacaagctggtgcgagaaggtgatcggtgccggcatcagcacgtcggtttcgttgctggcgtagccgaacatcaggccctggtcgccggcgccctgatcttcaggcttggcgcggtccacgccttggttgatgtccggggactgcttgccgatgatgttcatcacgccgcaggtcgcgccgtcaaaacccacgtcggagctggtgtagccgatgtcggtgatcacatcacgaacgatctgctcaaggtcaacccaagcggacgtcgtgacttcaccggcgatgatcgctacgcccgttttcaccagagtctcgcacgccacacgggcgaacttgtcttcagcaatgatggcgtccagcaccgcgtcggaaatctggtcggcgattttgtccggatgcccttcagacacggactcggaggtgaaaagggagtattcgctcatctcgatgttttcctgatatttaccgatggtgagtgtcgccagccggtcgctgaaaatggcggacctgaatctggaaaccattacgtaaacctacatagaggctttccccgggaacgagtcccgcagcggtggcccaacgggccagatcgtcctgttcaaaacccaaccagagatcaccgcaggcctccttggcccaattctggttgtggctgcataaatccgtaaccagcaggctaccgccggggtgcagcaacccggccatttgcttgagggcgtcggcgggggcggcaaaatggtgcaagaccatgttcagcaccacgcaatcggcccgcaggctggtgtcattcaaggcgtcggccaactgcaggctgacgttgcccagcgcttcgcgctcacacaactcacgcgccagttcgagcatggcggggctgttgtccagcgcggtgacttgctgaaagcggcgcgccagttccggcaggaacccgccatcgccggggccgacttccagtgcggtcgcttcatcactgaagctcagcttgtccaacagcgccagtacactttcacggtattgggccaagccggcgatcaggtcctgctgggcgcgaaacttctcggcgacccgtgagaaaaagtcctggctggcggcggcgcgttgcccgtggacctgtgcgatgcgcgattgcacgtcactcggcaggctcaggctgtccacttcttcaagcagggcagcgtgcaacttgccgccgagcagctcggtgtggggcagggcgcggcggtaaaaaatcgcattgccttcgcggcgggtggccaccaggtcggcctgggccaagaccttcaagtggtggctcatgccggactggccaatggcgaagatttgcgccagttccagtacgccaaacgagtcattcgccagtgcgcgcaacacgttcaggcgcaacggatcgccagcggccttgcacaaggctgccagttcatcgccgtcgtcgggacgcagggagggcacgggtaggttcataaggccagcagtctagtgacggggggaaatccctgcaaggtcaatatcaaaaagttttgatattgatcgataagtggcggttataagccgtcgctataacctttagacgaagcggtcggccctttctgcaagggattgctgtgcaaacggcaggaaaaacgccctcaagtgactatctgtcattgcccgcaggcggtggctgagggaaaatgccggtccttttttccgtttcttttattcaacctccaggagatcagcgatgcccagccgtcgtgagcgtgccaacgccattcgtgccctcagcatggatgccgtgcaaaaagccaacagcggccatcccggtgccccgatgggcatggcggatatcgccgaggtactttggcgtgactacctgaaacacaacccgagcaacccgtcgtttgccgaccgtgaccgcttcgtgctgtccaacggccacggctcgatgctgatctactcgctgctgcacctgaccggctacgacgtcaccatcgacgatctgaaaagcttccgccagctgcacagccgcaccccgggccacccggaattcggctacaccccaggcgtcgagaccaccaccgggcccctgggccaaggcctggccaacgccgttggcttcgcgctggctgaaaaagtcctgggcgcgcagttcaaccgccctggccacgacatcgttgaccaccacacctatgtgttcctgggtgatggctgcatgatggaaggcatttcccacgaagtcgcttccctggccggcaccctgggcctgggcaagctgattgccttctacgatgacaacggcatctccatcgacggcgaagtcgaaggctggttcaccgacgacaccccgaagcgtttcgaagcctacaactggcaggtgattcgcaacgtcgacggtcacgacccggaagaaatcaagaccgccatcgacaccgcgcgcaaaagcgagcagccgaccctgatctgctgcaagaccaccatcggtttcggttcgccgaacaagcaaggtaaagaagactgccacggcgccccattgggtgacgcggaaatcgccctgacccgcgaagcgctgaagtggaaccacggcccgttcgaaatcccggctgacatctacgccgagtggagcgccaaggaaaaaggcctggcgaccgaagccgagtgggaccagcgttttgctgcctactccgccgaattcccggaattggccaacgaactggtgcgccgccttgccggtgacctgcctgctgacttctcggaaaaagcctcggcctacatcgccgaagtcgcagccaagggcgagaccatcgccagccgtaaagccagccagaacaccctgaacgcctttggcccgttgctgccggaaatccttggcggttcggccgacctggccggttccaacctgaccctgtggaaaggctgcaaaggcgtatcggctgaagacgccagcggcaactacatgtactacggcgtacgtgagttcggcatgagcgccatcatgaacggcgtgtccctgcacggcggcctggtgccttacggcgcgaccttcctgatgttcatggaatacgcccgtaacgccgtgcgtatggccgcgctgatgaagaagcgtgtgatccatgtgtacacccacgactccatcggcctgggcgaagacggcccgacgcaccagccagtcgagcaactgaccagcctgcgtaccacgccgaacctggattgctggcgcccagccgacgcggtggaatccgcggtggcctggaagcacgctatcgagcgcaaggacggcccttcggcgctgatcttctcgcgtcagaacctgcaacaccaagtgcgtaccgacgcgcagatcgccgacatcagccgtggcggttacgtgctgaaagactgcatcggcgagccggagctgatcctgatctccaccggttccgaagtgggcctgactgttcaggcctacgacaagctgaccgcccagggccgcaacgtgcgcgttgtgtccatgccgtgcaccagcgtgttcgaagcccaggacgccggctacaagcaatcggttctgccgttgcaggtcagcgcgcgcattgccatcgaagcggctcacgccgactactggtacaagtacgtgggcctggaaggccgcgtgatcggcatgaccacctacggtgagtcggcgccggcgccagcgttgttcgaagaattcggtttcaccctggaaaacatcctgggtcaggctgaagagctgctggaagactaagtcagtctgcgttgtctgtactggcgctatcgcgggcaagcccgctcccacatttggatcgcggtctaatgtgggagcgggcttgcccgcgatagcgtcagaacattcaacaccgaactaaccttgatcgagaaccccatgccccaaccgcgtccctacaaagttgcactcaacggctacggccgcattggtcgttgcgtcttgcgtgctctgttcgagcgaggggcggcggccgggtttgaaattgttgcaatcaacgatctggctgacatggccagcatcgaatacctgacacgctttgactccacccacggccgctttcccggcgaagtgcgggtcgaaggcgatagtctgcatattaatggcaactgcgtgcaggtcttgcgcagtgccacccccgaaggcatcgactggaaggcactgggcgttgacctggtgctggaatgctccggtgtctaccacacccgtgccgatggccagcgttttctcgacgccggcgcgccgcgcgtgttgttttcccagccgatggccagcgaagcggatgtcgacgccaccatcgtctacggcatcaatcaggattgcctgaccggtgacgagctgctggtgtccaacgcctcctgcaccaccaactgcagcgtgccgttgttgcgcctgctggatcaggcgattggcctcgactatgtgtcgatcaccacgatccactcggccatgaacgatcagccggtgatcgatgcttatcaccatgaagacctgcgccgcacgcgttcggcgtttcagtcagtgattccggtgtccaccggcctggcgcgcggcatcgaacggcttttgccggaacttgccgggcgaatccaggccaaagccgtacgggtgccgacggtgaacgtgtcttgcctggatatcaccatgcagaccgtcagcgacactgatgcggcggaggtcaaccggattctgcgtgacgccgccaccagcggcccgctcaagggccttttggcctacaccgagttgccccacgccagttgtgatttcaaccatgacccgcattcggcgattgtcgatgccagccagacccgcgtttccggcccacggttggtgaacatcctggcctggttcgacaacgaatggggttttgccaaccgcatgctggatgttgcggaacattatctgcacatcgcctccaaacaacctcaacagtaattcaggaactgcgacccatgaccgtgttgaagatgaccgacctcgatctgcaaggtaagcgcgtactgatccgcgaagacctcaacgtcccagtcaaggacggtgttgtcaccagcgatgcgcgaatcctggcctcgctgccgaccatcaagctggccctggaaaaaggtgcggccgtgatggtctgctcccacctgggtcgcccgaccgaaggtgagttctccgctgaaaacagcctcaagcctgtcgccgactacctcagcaaagccctgggccgcgacgtgccgctggtggctgactacctgggcggcgttgacgttaaagctggcgacatcgtgctgttcgagaacgtgcgcttcaacaaaggcgagaaaaagaacagcgacgaactggcccagcaatacgcggcgctgtgcgacgtattcgtgatggacgccttcggcaccgcgcaccgcgccgaaggttcgacccacggcgtggccaagttcgccaaggttgcagcggctggcccgttgctggcggctgaactggatgctctcggcaaggcgctgggcgctccggcccaaccgatggcggccatcgtggccggctccaaagtctccaccaagctggacgtgctcaacagcctgagccagatctgcaaccagttgatcgtcggcggcggcattgccaacactttcctggccgcagccggccacccggtgggcaagtccctctacgagccggacctgctcgacaccgctcgcgccatcgctgccaaagtcagcgtgccgctgccggtcgacgtggtggttgccaaggaatttgccgaaagcgccgaagccaccgtcaagctgatcgctgatgtggcggccgacgacatgattctggacatcggcccgcaaaccgcagccaatttcgccgaactgctgaaggcctcccagaccatcctgtggaacggcccggtcggcgtgtttgagttcgaccagttcggcaacggcaccaaagtattggccaaggccatcgcagaaagctcggcattttccatcgccggcggcggcgacaccctggccgctatcgataaatatggcgttgctgaccagatatcctacatttctaccggtggcggcgcattcctggaattcgtcgaaggtaaagtcctgccagccgttgaagtcctggaaagccgggccaagggctgaggctcgcgatcaggaaaaggagcattcccatgatcaagtcgttggcactggtgatcgcagcgggcctgttggccggctgcggcagcacgccaagcgctgtgcctgaggctgaaaagcctgggcctgcgcagaaaaaaggctgctaccaggctgactggcaagccgagaccatgccggtgatcaacaagcgtatcggcaacgagcgcctggagaaatacgacgccgcgcccaacggtcaggaacaggggtgcccctgacgggtctgatcaactaaccgacagcagtggcggcccttgggccgtcgttcgaggattggcaatgaaaggcgttttcgccctggcagctctggctctattagccggttgcagcagcatgaacatgttcaacaaggcagagccgtccgccgacaaatggaccacctggacctgcgacagcaaggccgaagtcaactggcgctttgccaatgcggcccgcaatgaggtggatgtacgcctcggcggttccgaccaggtttaccgccttaaacaggaggttgcggcctctggcgtgctgtacagcgacggccagttggcgtttcacacaaaaggtgaggaaggcctggtttactgggtcgccactgatgatttgattgggcgtggctgcaaggctcaatagtgagcccaatgaaggtcaagtgtgggaacgagcttgtgtggcgagggagcttgctcccgctgggctgcgcagcggccctaaaatcttgggagcgcttcgcactccagcgggagcaagctccctcgccacagtaagccagcttccacatgattcggttccaaacagggatctgaatcagcaataacgattcagcaggccaagccttaaccccttgatctgcaataacttgaatagcagccgccgctacggcaggcttgcacgattaacgaccctcgaccgggagagacaacacaatggcacttatcagcatgcgtcaaatgctggaccacgcagccgagttcggctacggcgtcccagcctttaacgtcaacaaccttgagcagatgcgcgccatcatggaagccgctgacaagaccgactccccagtgatcgtccaggcttcggccggtgcccgcaaatacgccggtgccccgttcctgcgtcacctgatcctcgcggccatcgaagaattcccgcacatcccggtgtgcatgcaccaggaccacggcaccagccctgacgtgtgccagcgttccatccagctgggcttcagctcggtgatgatggacggctccctcggcgaagacggcaagaccccgaccgattacgagtacaacgtacgcgtcacccaacaaaccgtggccatggctcacgcctgtggcgtatcggtggaaggcgagctgggctgcctgggttccctggaaaccggcatggccggcgaagaagacggcatcggcgctgaaggcgtgctggatcacagccaaatgctgaccgacccggaagaagccgctgacttcgtgaagaagacccaggttgatgccctggccatcgccatcggcaccagccacggcgcctacaagttcaccaagccacctaccggcgacgtgctggcgatcgaccgcatcaaggaaatccacaaacgcatccccaacacccacctggtgatgcacggttcttcctctgtgccgcaagagtggctggcgatcatcaaccagtacggcggcgacatcaaagaaacctacggcgtgccggttgaagaaatcgttgaaggcatcaaatacggtgtgcgcaaggtcaacatcgacaccgacctgcgcctggcgtccaccggcgccatgcgtcgcctgatggccaccaacccgagcgaattcgacccacgtaaattcttcggcgccaccgtaaccgcgatgcgcgatgtatgtatcgcccgttacgaagccttcggcaccgctggcaacgcttcgaagatcaagccgatctcgctggaagcgatgtaccagcgttacctgaaaggtgagttgaacgccaaggtgaactaagcctcagcgtttaaaaaaagcccgcagcgatgcgggcttttttgtgggcggtgtttcgagcgcgccaaacccctgtgggagccgggcttgcccgcgatggcggtgtatcagtcacccaatgtatcgactgacagtccgggctcccacagggtacggcggcgtctagtcgaggcgctcactcatgatcaatatccagtttggcaaacgtcaccctcgcgccttccttgctgttgccgctgttgtcctgcacatacacccccgccttgaaatacagctgcttggcgccccacgccgcgccaatgcgctcgttccactcgccatcagcggcatacacgctgagcagcccggccttgttgaggttgattacgtaggtaaagcttttttccagcggcacattggacgccacggtgatcacacggccttcgccgtcatccgggcgcatgcgcactttggcgacgatgttgccggtctgggttttctctttgaactgatattcgagtttgatcagcggcttctggctgtcgtaggcatgaatctgcccgatcacgaccttgccgctggagggcacttggttgacggtcagggtcgcacgcaaaaagttgtcggcgtcggggtaggtccagttgcgcaggcgcccgtcggcgtaggtttcgcgcaattcgctgcgcgggtagatggcgttttctgtgcgggtgccggtgacgggggtccagaattgcacgttgctgccttcggcctggaagtactggtccttgaagccgctcatcaattttggcgtgttgatggtcgcgggcggcgagccgacgggaatgctcaggttccaggtggaaaggtcgatcatggcgttggccttttacagagggtgaaagctttagcccgggggccttacaggttctttataggcggtgctcgtccggttgttaaacaattgctggcaatttattggcgtcagaggaatgccaaaaagccatgtttcccatgctacgtggcctgtagggcctgaccgttagtcggcttcctcggctttggcgcaatgatggcacccacgtcacttctgcttttttggaaccggggctagagtgaggcctcagtgtttgtccggtctttttatcagaagtgaccggtgcagtttcttaaggaagagacgtagcatggattgcgctccacaccacggcgatggcagttcggttcttttggtggtcgatgattacccggaaaacctcatcagcatgcgcgcgcttctgcagcgggacgactggcgggtgatcaccgctgcttccgggctggaagccctggaattactgctggcccatgaagttgacctggtattgctggatgtgcgcatgcccggcatggacggctttgaagtcgcacgcctgatgcgcggcagccagcgcacgcgcatgaccccgattattttcctcacggccaatgcccaatcacccgctgcggtgctggaaggttatgccagtggcgccgtcgattacctgttcaagccctttgaccccaatattctcaagcccaaggtgcaggcgctgctggaacaccagcgcaatcgtcgcgccctgcagcgcctgagccatgacctggagtctgcgcgggccttcaatgcctccgtgctggacaacgccgccgaaggcatcctggtggtaggcgagggcagtgtgatcgagtacgccaacccggctatttcgcggctgctcaacgctacgatggccgaattgcaaggcgagagtttcttgagcttcctgcaaaaaccccatgtaccggcgtggctgagcttcccgatgtacgaggcctatcgcaaaggcgagacgtggcgccagcacgacgccattttgcgcaccggccgtggccagcaagtgccggtggccttgtccagcgcgccgttgcccgccgagcagaaggccatggtcgtgacggtgctggacatgtccgaggtgcgtcatctgcaccagcagctggaattccaggcagtcaccgatccattgaccggcctgctgaaccggcgtggctttcatcaggcggtggaaaataccctgttacgcagcgagcgaaacgaacaatcgctggtgctactgtacctggacctcgatggtttcaagcgggtcaacgactcgctgggccatgatgcgggcgaccgggtgctgcgctgggtgtcggagcaaatgcaggcgtgtttgcgctcctacgacattcttgggcgcatgggcggcgacgaattcaccgcgctgctggagctggagttcccggagcaggcggcgaagatttcggaaaaactgatcgaacgcgtgtcagtgtgccagcaagtcgacggcctggatgtgatgctcggtgtcagcattggcattgcgacgttcccggactgcggctcggacctcaatggtctgctgcgcgccgcagacatagccatgtatgaagccaagcgcgcggggcgtcagcagtatcgctattacgatcaggaaatgaacggccgtgcccggtcgcggctgatgcttgaggacagtgtgcgcaccgccatccagaacaaggatttcacgctggtttatcagccccaggtttccctggaagacgggcgcttgcgcggagtcgaggccttgttgcgctggcagcacccgagcgtcggcgatgtgccgcccgggttgtttttacccctgttggaagaggcacggttgatcagccagttgagcgcgtggatctaccagcaggtcgcggcgcagcgccaagcctggcagaccaccttcgatgaagacctggtgctgagcgtgagcctgagcagtagccagttcaatatgcccaacctggcgactcaactgcagcaggtccttgaacgacatgggctgcacgggcggcaattggaggtggaaatcggtgaagactgcctgatgagtaaccttgaagagtcggccaagcagctcaagctgctgcgccagatcggcatacgcattgccttggacgacttcggttgcggccagtgttccctggcccatttgcgcgacctggagttcgacacgctcaagctggacccgcaattggtggcgcgtctgccaggctcgacgcgggacgccgcgatggcgtgcagcatcattcagttatgcgggcattttgatgtgttggtgatcgccgagggcgtggaaacccaggaacaggcgcgctggctcaaggccaatggttgctcatttatccagggggcgtgggcggcgcagccgttgatggcagaggaaatgctcgcctggtcgcacccccgtctgctttgaattcgctacactggcggccaatcgaaccctgttgcaggccccatgaccacgctgaaatacctccaggcttatcccgctgcgcttcaggagcaagtgcgtcaactgatcgccaaggaccagttggccgcctacctggaacaacgttaccccgagcgccatggggtgcagagcgacaaggcgttatacagctacgccctggcgttgaagcaggaacacctgcgcaacgcgccggccatcgacaaagtgctgttcgataaccgcctggacctcacccaccgcgcccttggcttgcacaccacaatttcccgggtgcagggcggcaacctgaagtccaagaaagagattcgtatcgcctcgctgttcaaggaggcggcgccggagtttctgcgcatgatcgtggttcacgaactggcgcacttcaaggaatcggaccacaacaaggccttctacaaactctgcgaatacatgatgccgggctaccaccaggtggaattcgacctgcgggtatacctcacgtatcgcgacttgcagggcaagccctaacctcagcaggcgacccaccatggacgtgagcaagaccaaaagcagcttttaccgccgcctgtatgtggcgtatttgatcgacagccagcaagccagcagcgttccggcgttgaccgacgtcaccggcatgccacgacgcacggcgcaggacacgattgcggcgttggctgatctggacattgtgtgtgagttcgagcaggaagatggcgctcgtaaccacgcggggcgctatcggattcgcagttggggggcgatcgataaagcctggattgaggcgaatctggcggtgatcaagcaggtgctggggtatccgtaattcttggggttgccgggctgacgctatcgcaggcaagccagctcccacattggatcgggttcacacggtcaccatgtgggagctggcttgcctgcgatgaggccctcaagcccggcgcataccaatatgtggaatatcgtcctccaggtattcctcacccgcgaccacaaacccataccgcccgtaatacccctgcaaatgcgcctgggctgacagaaaaatcggcgtctcgggccagatatcgccaatctgcttgagcgcctcttccatcatctgatgccccaacccggtaccgcgcgccaccggcgctacgatgacccggccaatcaccacgtcgccgccctgggtttccgggtccagcaggcgcaggtaagccaccagttcatcattgtgccaagccatcaggtggtgggtgtcgctcgagaggtcctgcccgtcgaggtcctgataaacgcatttttgctcgacgacgaagacctcgttgcgcaggcgcaaaatggcgtagagctgctctttgcccaagtcatcgtgatgtttgcagacccaatcgaccgtcatggtgtttttctcttgttcaatgtctgtgccggatagtaagcgcggcaggcggcgctgtctaaattgagcatttttgtgaatggcgtcaattagccatcattcagtgcgggcaccgctgtcttgtttgtgtaatctgcaatacaggctcattgatgagctactgttatcaggccatcgcctgcccgccaaggaccttgagcatgccgcgattttctcgtgccgttgctttgatcgctgtgttgttgctggcgcaacccgcgctggcacaacgcctgcgtctggtcgcggatgcctggccaccgtttaccgattccaccctggtcaatggcggtttggccaccgatatcgtcaccacagccctgagccgcgcgggctatgccagcgattttgagcaagtgccttgggcgcgtgcgttgatgggggtcggggatgggcgctatgacgtgctggtcaatgcctggtacgacgacgcccgcacgcagctggggcagttttccggtgagtacctgctcaaccgcgtgcgctttatcaagcgccgcgacgacaccatcgactatctgaacctggaacagctgcacaacgagtccattgctgtggtgcgcggttatgcctattccgcacccttcgaccaggacagccagttgaaaaaagtgccggtgcataacttcgccatggccgtgcgcatgctggcggcgcagcgtgtgcggctgaccctggaagatgagtatgtcgcccgctattacctggcgcgcgagtcgccgcgggtgcgcaatgcggtggagtttctggacaagccgttgagtgaaaacagcctgcatattctggtcagcctgaagaaccccgagcatgcgcagattgtcgccagctttgatcgggagattgccaggatgaaggcggatggcagttatgcgcggttgatgaaggcgcatgggatgtagggcgcttcagggccctatcgcaggcaagccagctcccacacttgaaagtgttcacaaatcaaaagtgtgggagctggcttgcctgcgatggcggcctaagccgcgctggtatctttgatcaaatgtgccgccaacgtacgcaacggccccaactgccggcaaatcaacgccaactgcgtctgcaccagccgctgcccttcgtcgatctcatccggcatctgctcaaggtccgccgccagggcttcctccgcatcactttgaatcgcaatcggctgcttgttcgccagccccgtggcgatttcatcaatgctcaccgccagggagttaccggcgccatcaatcaaatgctcacgcacttcggccggcagctgcgtctcacggtgcgcgcccagccctgacaaataactgagcaaggtgtgcgacagcaccaggaagcggaagcccacgtcggcttccttacggaaatgccccggctccatcagcatgttcgccagggtggtcgacagcgctgcatccgcgttgtgcgcgttgcgccgggccaggcggtaggccaggtcgtcgctcttgccagcggcgtattgctgcatgatttgccgcaggtagatgctgttgcaggtcagcgtgttggccagcaccttgttcagccggcgaccttgccagtccggcaggaacaggaataccgcaagacctgcgatcaggctgccgagcagggtatcgagcaggcggggcaggaacagcccgtaaccgtcgcccacctggttgaagcagaacaacaccatcaacgtgatcgcggccgtagccagggtgtagcgcgtggtgcggttgataaagaacaccaggccggcagcgatggcgaacatcgattggaccagcgggttggggaacaggtcgaacaacgcccaggcgatggtcaggccgatggccgtgccgatgatccgctggccaagcttgcgccgggtggcgccgtagttcggctggcagacgaacagggtggtgaggatgatccagtagccctgggacgggtgaatcaggtgcaccatccaatagccgatcatcagcgccagcggcaggcgcagggcgtggcggaacagtaaggaggtcggcgtcagttgtgtgcgcaggcgcgtccacatctcgctgaggttgcgcggtgcgcggtccagcaggctgctgtcggtggcatcggcgagggagtcggggttgctcgcgtcgccaagcaggcggtcgagtgtggacaggttggccgccagggcgcgcaacgaacgcagcaaaccgcgccacgccgggttgctctggatgcgcaggtgttccagcgaggcattcaggtcgcccagggcttcggcgaagctgtcgtcatagatgaacggctggcgcagctgaatcgactcggccagtgcctgacaggccttgccttgctggcgcaacaggcgctggcagcggaacagcacgtcgctgtggaagaaggcttcggccagggcgttataggggtagtgcgacgagctggcgcgttcgtggatgtcctgggcgaggaagtacagcttcaggtagcggctgaccttcgagcccggccggccattacccacgcggtgcaggatgatttccttcgccgcgttgagcgctgcgacgacgcggccattttgctgggccagctccaggcgccgagcttccacatccagctggcggatcggttcgaacagcgacgatttgagcttgaggtaacgccccagctcgcgaaacaaccgcgccaggctctgttgcaccggctggttggagaacagcgcctgccacagcaccgacagcacgccgtaccaggcggccccggcgaccagcagcagcggttcatgccagaaatcggtgacggcaccaccgcgctggtccacgccgatcatggtgtacaccgacaggatcagcgttgctgacgcaattgcgccatagcgctcgcccagcgcgccgagcatggtcaggcagaaactggccagggccagggcaatcgcgaaaatccatgggtaagggaacagcaactccaccgacagcgcggcaacgctgaaacataccagcgtcaccgccagggcattgagacggccttgccaactgtcatcggtctcggccagggcgctggcgataatccccaggaacagcgggatcagcagcgtcatttcatcctgataccagcacagcgccatgctgccggtgagggcgatgaatacccgtacgctgtaactgaatttatccagcgcccacaggcgccgcatggactgcttgaacgaggtcgatgacatgaagtctggagtcttccgggacgatgccgctaaattgagctatcaaggacgccgcggcaagcgtggcgatcacatctcattgcatatttttcagcgtcaccctaaaacgaatgtgggagctggcttgcctgcgatagcggcggtgaattcaccaccgctatcgcaggcaagccagctcccacattttgaccgagtacagccttttgtcaggcgtactgcgcagccgcgtagcccgaagcccacgcccactgaaagttgaacccgcccaggtgaccggtcacatccagcacttcgccgatgaagtacaaccccggacttttcagcgattccatggtcttggacgacacttcccgcgtatccaccccacccagcgtcacttcggcggtgcgatagccttcagtgcccgcaggcaccaactgccaactgcccagtttctgcgcgatgtcggcgatttcagcgtgggtgtattgcttcatcggcttggacgcgaaccaggtgtcggccagcaggttggccatcttcttggtgaagatctcgcccagcagggttttcagctcactgttcgggcgctcggcctgctgctgttgcagccaggtgtgggcgtcgtggtcaggcagcaggttgatttccacggtgtcgccggtttcccagtacgaggaaatctgcaggatcgccgggccgctgaggcctcggtgagtaaacagaatgttctcgcgaaagctctggtcgttgcagctgaccaggcaatccacggaggtgccggacaactcaccgcacatatccttaagctggtcagtgatggtaaacggcaccaatcctgcgcgggtcggcagcagttcatgaccgaactgcctggccacttgataaccaaaacccgtggcgcccagggtcgggatcgacaggccgccggtggcgatcaccagggattcgcagcgaagctcacccaaggtggtttgcaactgatagccaccgtcgaccttggcgatttcttcgatcgacgtatccaggtgaaggcttacgccggtctggatgcactcgtcgagtagcatgccgaggatgtcgctggacttgttgtcgcagaacagctggccgagtttcttctcgtggtacggcacgccgtgcttggccaccagcccgatgaagtcccactgggtgtagcgcgccaacgcagatttgcagaagtgcgcgttgtgcgagaggaagttggcgggctcggtgtacatattggtgaaattgcagcggccaccgcccgacatcaggatcttcttgccggccttgttcgcatggtcgatcaacatcaccttgcgcccacgcccggcggcggtcagtgcgcacatcaagcctgcggcgccggcgccaatgatcacaacttcggtcgagcgcaaaacggtgtcctcacaaaatacttgccttggaatgcaattaaaaatgtgggagcgggcttgtgtgggagccgggcttgcccgcgatgcaggcacctcggtatgtcagttacaccgaggtgatgctatcgcaggcaagccagctcccacacaagcccgctcccacattgaatctccattgagtcagagatttctacaggatgcgaacgcgcaacgaacggcccttgatcttgccgtcgttcaagcgctgcaacgcctgcttggcgatcccgcgttccacggccacgaacgcctggaaatcaaagatcgcaatcttgcccacctgggcccccggaatgccggcgtcgccggtcagcgcgccgaggatgtcgcccgggcgaaccttgtctttacggccggcagcgatgcacagggtgctcatctgcggcagcagcggaccaccgctttgtggcttgaggttgtccagttggtcccagttcagcggcgacttctgcagctgctcgatggcctgggcgcggtgcgcttcggatggcgccaccaggctgatggcgatgccggtctcaccggcgcggcccgtacggcccacacggtggatgtggatttccgagtcgcgggccagctcgacgttgatcaccatgtccagcgcgtcaatgtccaggccgcgtgccgcaacgtcagtggcaaccagcaccgaagtactgcggttggcgaacatcgccagcacttggtcacggtcgcgctgttccaggtcgccatgcaggccgacggcggaaatgcccttggccgtcaggtgatccacggtttcctgcacttgctgcttggtaaagcagaaggctacgcacgaagccgggcggaagtgcgccaggaccttggtcacggcgtccatgcgttcttctggcgaaatctcgtagaagcgctgctcgatctggtcgtcggagtggaacgcttcggctttcacctgttgcggcgcgcgcatgaacttggacgccagttgcttgatgctcaccgggtaggtggccgaaaacagcagggtttggcggcgtggcggggtcttgctgatgatgtcttcgatggcgtcgtagaagcccatgtcgagcatgcggtcggcttcgtcgaggatcagcgtgttcaggccgtcgagtaccagtgaacccttgcgcaggtgctgctggatgcggcccggggtgccaacaatgacgtgggcgccgtgttccagggaagcgatctgcgggccgagggacacgccgccgcacagggtcagcaccttgatgttgtcttcggcacgggccaggcgacggatttccttggcgacctggtcggccaactcacgggtcgggcacatcaccagcgcctggcaaccaaagtagcgcgggttgatcgggttcaacaggccgatgccgaaggcggcggtcttgccgctgccggtcttggcctgggcaatcaggtccagccccttgaggatcaccggcaagctttgcgcctggatctgcgtcatctcgacataacccagcgagtcgaggttagccagcatggcggcggacaggggcaaagtattaaaagcggtggcgatggtagtcacgggactggctctgcaaaacaaaatgttgcgcagtgtaccagccccgcaggattttccccgcaagttctagacgggaagccggttaatgctcgagatcgtgctcgcggctgatcacccgtttgccgtcggtgggcgacagttgcaagaaaatcgccgccgccagcattgccatgatgcccacggtgaggaaggtcagctggaaggcgccgagcacgctttctacaccgtcattgccggtctcggcggtaaacccgccgagcagtgcaccggcgcatgctacgcccaggctgagggacaattgcgccaccaccgagagcaaactgttgccgctgctggcctgggcgtcgtccaggtcgatcagggtaacggtgttcatcgcagtgaattgcagggagttgatcgcccccagaatcgccagcatgcacagcaagagcgggtagggcgtgtgttcgctgaccaggcccatgctggcgagcatgatgcccaggaacagggtgttgccggtcagtacgatgcggtagcccaaacgctcgatcagcgtacgcgcgatggacttggcaaacatcgccgccgccgccagcggcaacatgctcatcccggcttctgagggtgagtaacccagcgccacctgcaacagcaacggcaccaggaagggcagagcgccgctgccgagtcgcgcaaacaggttgccgagaatgccgacggcaaaggtgcgtgtcttgaacagcaccggcgaaaacaaaggattgtcgatatgcccggcgcgcagccagtacgccgccaggcacgctagcccgccgaagagcaacaacatcacccgcaggtgcggcaagtgcagttcgcccaggccttccatggcgatggtgatcagcaccatcgccgcgccaaacagcatgaaacccacgctgtcgaaacgcgtgcgctcgctgccgcgcaggtcggggatgagtttccacacggcgtagcagccgatcatgcccacgggcaggttgatcaggaagatccagtgccaagtcaggtattgcaccatccagccgcccatagtcgggccgagcagggggccgagcaggccgggaatggtgatgaaccccatgatgcgcaccagttcggagcgcgggtaagcccttagcacgacaagccgcccgaccggcagcatcaacgcgccgcccaggccctggatcacccgcgcgccgaccagcatggtcaagctgctggacagggcacataacagtgagccaatggtgaacagcatgatcgcgccaaaaaagatcttcttggtgccgaagcggtcggcgacccaacccgaggccgggatcagcaaggcgacggtgagcatgtaggcgatcaccaccccttgcatgcgcagcgggttttccgcgaggtcccgggccatggccggcaatgccgtgttcagaatcgtcccatccagcgattgcatgaagaaggcaatcgccaccacccagggcagccagcgggcggtcttggcatcgagcgggacgcgattcggcatggggaaccttttttgttagcaggctatgtgtcggcgattatgcgccatccatcgctccttttcccacaggcggttcgtctaaatctgacaactttgcgtgcttgcccaccagaaaatccagcagcgcccggtgcaccgacagcgcggcttcgcgggactccagatcgagcaggtgaccggtatgttcggcgacggcaaacgtgctgcggcccacgtagtctttgaaccgctgagcgtcggcggcgggggtgtattcgtcgagcgtgccgttgaggaaatgcaccggcgtttcaatctgcttgagcgccggcaggtagttgccatcgcccaagcccaggacttggtggatatgaaaacgcgcctggcggtactcggtggtggccatgttcgacaggtggcggtggttgttgcgcttgaggcgcggcgacaggtatttgccgaccgtctcgttgagcaagtgcccgacggcagacttgtcatcggcctcgatcagcacgcgtacccgttccacgtaatcgagcatggcttggttaaggttgggcgccagggccatcaccaccgagctttcgatggacggcgggttgtgggcgagggtcagcagggtggagatgccgccccaggaggccgacaccaggtggttgacctggaagcgctccaccaatgcgcggaggatttgtacctcgtcgtccttggtgacgaggtcgaggtcggcgttgtgttcgcgtgaataccccgagaacggcaagtcgaacaacaacacattgaagtgttccgcgaggcatttgctggtgcgggcaaatgagcgggtggtggaaagggctccattgaccagcaggacggtcttcctgttcgggtcgttgcccagcctctcgatgtgaacgttgtagtgcttgaacagcctttcaatgacaaaacttccatggttcatgtcaacgctccagcttgccctatcctgggcaaggtcgtgcacacgcgcatgcacgtgggtggtatggcgggatgccactaacccttataacgaggttttttacaggcgacaactggccgtgtgtgcaggcggcgaagaggagaaatggcggtaggacggggcggagccgagatgtatgaatgcgacgagaacccctgtgggagctggcttgcctgcgatggcatcactgcagcgtgactgatacacctcagtgcctgcatcgcgggcaagcccggctcccacaggagccggttgccacattgggtttgtggttacagagtgagtgtgaggcgttttaccaatgcgcccggcagcaagtttgacgcggtattgcgctggctatacgtactcgccgacagcaacaactcccgctcagccgtcaacgcttcgagctgcgaacccagcaggctgtaaacgctgtcatcaaagcgcattgtgctcactggcgctttgatctcgccgtcttccacccagaacgtggcgaagcgcgtcatgccggtcaggcgggcggcgggcaggtcggagtagttcaggtaccacaggttgctgatgtacagcccggtgcccagtgccttgaggatatccgcctgggccaaagtgccggccgccacttgcaaggcgctgggggattcatcactgctggcgccgttggtgctcaggccatattcggcggcgctgcgtgagttgatcaactgcccctcggccttgccatccttgatcagcgtgacatcaccgcgcgggtagccctcggtggaaaacgcctggctgagggagccgctgatctgctcgctgacggtgaccagcgagcttaacgactgctcatcggcgtagagcttttgcagggaactgcctttgctggcgatggcctgggcggaaaaaccgccccaagtgatgatgctgaaaatttcttccagcgccgccggggcgaggtaggcgcggtattgccccggcgccagtgtgtgcagcgggcggccgaggaattccagttgctcgcgggcctggtggaagcgtgcggcgaactcggtgctgttccaggtgtgcccggcgtagctggctttgacggcctcgccattggcgtggaacaggctgaaatcaaagttgaagctattggcgcggtgccagccgaatgcgccgtcggagctggcaaagccacgggtgatcggacctgcggcgtagaaaccgacgaggtcgacaccttccgccgcttggctgatgtcttccagcacctgagtcagttccggcagggggcgggtctgttcgttgttgctttgccaggccgtgtgattgagcagcagatacgggtcctgcggcagcaacggcaaggtttcgcgcagttgttgcaggccatcggcgaggcgttggcgatccagttccggctcgccggacagggtgatgcccaggtcggcgtggcggccgtcgtcgatcagtttcagattcaggctggcctgttgcacctgcccggcctggcgcacctgcgcgtggttgaagcgcacgaattcggacgcctcatcggcgtagcccaggtgaaattgttccttgtcggtgacagcctctttgagccagtccaccagtgccttgaagttattcatcaggcctcccccccaaatacgtcgacatggctgaacacacaggccggcgaggcgtggcccacgcggattacctggttcggctcgcccttgccgcagttcggcgtgcccagcaccttgaaggtgctggcatccccgacggcgctgagattgcgccagaactgcgcggaaatcgcgcggtagttcgggtttttcaccacgcccttgagttcgccgttttcgatcaactggccccattcgcagccgaactggaatttattgcgtgcgtcgtcgatggaccacgaacggttggtcgacatcaagatgccgttttcgatgccgccgatcagctgcgccaggctcttgtcgccggcttcgatgttcaggttggccatgcggtcgatcggcgggcggttccagctgctggcacggctgttggcgacgccgctcatgcccgaacggaattgcgacagcgcgccgcccaaaggtttgagcaacaagccttcgcgaatcaggaattgtttgctggccggggtgccttcgtcgtcatggccgtagctggccaactgttcgggaatgtccgggtcgaaggtcacgttgagcaagggcgagccatattgcagatggccgaagtcgctggctttcacaaagctggtgccggcgtaattacgctcgtcaccgaggatacggtcgagttccaacgggtggccgatggattcgtggatctgcaggatcatctggtcgggcatcaacagcaagtcgcgcgggccattgggggtgttcggcgcgagcagcagttgcaaggcttcgtcggcgatgcgcggcgcagcaccgatcaggccgaagcggctgatcacgtcaaagccgccttgctggccgaagttgctgccgcccagggtgcgggtctggctgtcgttgccgtcgtaggcggtcacgttgacgccggggaacacaaagcgctgggcctggcgcagttcggcgccggccgtgttgaggtagatctgctcgacgtgggtcaggcccaggctgacttcccagctcaccaggcgctcgtctttgggcacggcggccgattcgctgccgagcaattggtagcagtcgctcaaggacgggaagggctggtcgaggtcgggcgacaggtagtcggcgacgtcgctggacacgtgttgcatctgcaagtcgagcagcgcgtgaggcttgatctgccgggcttgctgttctgcacgttcgagggcggcttgcaggccggcaagggaaatgtcgttggtcgcggcgtacgcttccacgccgttgagacgcacggtgagcatggcgccttcgtcgtggttcagatgggggggcgcggcgacgtttttacggactgacaggtattggccggattcgcgtacgtagcgtaacgagaagaattcggcacgggtgcgcagggcaccgaaatgctgtttgagtgtggcgtgtttgtcgaacatggggccttccttgtgggcggctcgtcgcgggcaggcagacagagtagctgatcaaggaggaggtgagcacctgtggcgagggagcttgctcccgctgggctgcgtagcggccccaaaagcttgggagcgcttcgcactccagcgggagcaagctccctcgccacaaagtacgtcagttattgcgcggtagggcctacttcacgcatcggcttgccacgcaccggcgcatcgccagccacgtagtagtcagcggtgctgcgcggcagcggctggcggccacggatcttgtcggcgattttctcggcgatcatgatcgtcggcgcgttcaggttgccggtggtgatgatcggcatgatcgacgcatccacaacgcgcagcccctgcatgccatgcacgcggccttcgccatccacgacggccatgtcgtcggtgcccatcttgcacgagcaggatgggtggaacgcggtttcggcgtgctcgcggatgaacttgtccaactgctcatcggtttgcacgtcaatgcccgggctgatttcgcggccacggtactggtcgagtgccggctgttgcatgatttcacgggtcaggcggatgccgtcgcggaattcctgccagtcctgttcggtggccatgtagttgaagaggatgctcgggtagtcccgtgggttcttcgacttcagctggatgcgaccacggctcggtgaacgcatggagcccatgtgcgcctggaaaccatgctctttcacaccgttgctgccgttgtagttaatcgccaccggcaggaagtggtactggatgttcggccaatcgaattcttcgcgggtgcggataaaaccgcccgcttcgaactggttgctcgcgccgatgccggtgccgttgaacagccactcggcgccgatggccggttggttgtaccagagcagcgacgggtacagcgacaccggttgggtgcacgcatattgcaggtacagctcaaggtggtcctgcaggttttcgccgacgcccggcaggtcgtggaccaccgggatgtcgaggctttccagcaatttggccgggccaacgccggagcgttgcagcaattgtggcgaagcgattgcgccactgcacaccagcacttctttgcgcgcgcgggcttcgacgcgctcttcggcggcaccgatcaggtaacgcacgcctacggcacgcttgccttcgaacagtactttgtcggtgagggcgtgggtgacgatggtcagtgtcgagcgctttttagccgtgtccagataaccgcgcgcggtgctggcgcgacggcctttgggcgtgacggtacggtccatcgggccgaagccttcttgctgatagccgttcaagtcgtcggtgcgcgggtagccggcctgaacgcccgcttcaaccatcgcgtggaacagcgggttgttgccggctttaggcgtggtcacgctgaccgggccttcgccaccgtggtagtcgttcgggccgatgtcgcgggtttcggccttgcggaaatacggcagacagtccaggtaggtccagttttccaggcctggcagtttcgaccagttgtcgtagtccatggcgttgccacggatgtagcacatgccgttgatcaaggacgagccacccaggcccttgccgcgaccacattccatgcggcggccgtccatgtgtggctcagggtcggtttcgtaggcccagttgtagcggcggccttgcagcgggaacgccagtgcggctggcatttgcgtgcggaagtcaaagcggtaatccgggccgccggcttccagcagcaggacggtgacgccttcgtcttcggtcagacgggtcgccagggtgttaccggcggagccggcacctacaatgatgtagtcgtattcttgggacattggatgcaccctcttttgagatagtcaggtcgggcctcatcgcgggcaagcccgctcccacagggaaatgcattccaaatgtgggagctggcttgcctgcgatagggcactcacaggcaatacaaggctcggttcttagaacaccgaggcgtagtcgcccagctcaacctgtaccgatttgatgcgggtgaagttgttcagcgagctgatgccgttctcacggcccacaccggattgcttgtagccaccgaccggcattttcgcgtcggactcgccccaggcgttgatccagcagatacccgcttccagctgatgaatcacgcggtgggcgcggttcaagtccttggtcacaagacctgcggccaggccgaaatcggtgtcgttggcgcggcggatcacttcttcttcggtttcataggtgaggatgctcatcaccgggccgaagatttcttcacgcacgatggtcatgtcgtcagtgcagtcggtgaacacggtcggggccacgaacgcgcctttggcgaattcaccatcggtcaggcggtcgccgccgcacaggacgcgggcgccttcttccttacctttggcgatgtaacccagcacgctttccatgtgggcaaagctgaccagtgggccgaagttggtgttttcgtcttgcgggttgccaacgcggatgcgtgcaacgcgctcggcaatcttggcttcgaacgccgcttgcaggtgcttgggcacaaacacgcgagtgccgttggtgcagacctggccggaactgtagaagttggccatcatcgcgatgtcggcggcgcggtcgaggtcggcgtcgtcgaaaatgatcaacggggacttgccgcccagttccatggtcacttccttgagcgaggagctcgaagcgctggccatgactttcttgccggtgtcggtgccgccggtgaaggagactttctcgatgcgcgggtgctcggtcagccaggtgccgacttcacggccgctgccggtcagtacgttgaacacgccagccggaacgccggcttcggtgtagatctcggccagtttcagggtggtcagcgaggtgacttcgcttggcttgaagatcatcgcgttaccggcggccagggccggtgcggatttccacagggcgatctggatcgggtagttccacgcgccgataccggcgaccacgcccagcggctcgcgacgggtgtagacgaaggaggtgtcacgcagcgggatctgttcgccttcaatcgctggcaccaggcctgcgtagtattccagcacatcggcgccggtgacgatgtcgacgtattgggtttcggagaaggctttgccggtgtccagggtttccagcgcggccagttcatcgttgcgctcgcgcaggatatcgacggcacggcgcaggatgcgcgaacgctccatggcggtcatggcggcccagattttctggcccttttcggcgctgaccacggcacgttcaacgtcgtctttcgtggcgcgttgcacttgggcgagaacttcaccgttagccgggttgatggcttcgaaggtggcatcgctgccagcgtcgctgtagccgccgtcaatgtagagtttttgcagttcgaaacgggccataaagtcctcgcaagtgcataagtggttggcgttaaccgccgaaaagtggggccataagggtctggcaacactgagcgacagcagttcaggggttgagcggttatgtgtgctctaactcacctgcttggccaattggaaatccatgtattcgtaagcgatccgttgcgcctgctccgtgtcgaaagcgtctcccgacagggcgccgcgcaaccacaaaccgtcgatcaaagccgccaggccccgggctgcgctgcgtgcatcttccagcggcagcacacggcggaactggcagcacaggttggaatacaggcggtgatcgttgatccgctgcaacctgtgcaaagacgggtggtgcatgctggtggcccagaaggccagccaggttttcattgccgggccgttgacctggctggcgtcgaagttgccgccgatgatcacctgcaggtgtgcacgggggctgtcatccgtaagcgcaagcctgcgttcgtggacgttctcgatgagcacattcatcaagtaccgcatcgtcgcggcgatcaggccgttcttgtcctgaaagtagtgactgatgatgccgttcgaaacgccggccaaacgggcgatcagcgcaatgctggcatcccccattccgacctgatcgatggccgtcaaggtggcttcgatcaactgctggcggcgtatgggttgcataccgaccttgggcatgtagcacctctccttaggcctgccgatgggcgataaacgtccgtcggcttgagggccagtctattttgttttgattgaacgttcaatcaacaaagaataagatctgcgacaaatggtcgctgcctacagatgtttcctacctgagagcggcgccagatgacacctgcaaaaacccttgaaacaggccgtatcagggcctggcctccgcctcggcggggttcgagaattttcggggtgtctttataacacccgtccgtcgactgccgaaaaatcgatgtcccgggataaccgttgccttgtgtttctctctcgcactgcccggagcatctgcgccatgagttctgcctctcttataaagaccccgccggaaaaggtccgggtcaacggttgggtgttctacacctccaccgcgctcattctgttgttgaccgccattctgatcatcgccccgcaggaggccgggcgcatgcttggtgtagcgcaagcctggctgtcgaaaagcttcggctggtactacatggtggtcatcgccgcttacctggtgttcgtggtcggcctggcgttttcgtcttacggcaagttgaaactgggcagcaaggacgacaccccggactttagctacggcgcctgggccggcatgttgttctcgtcgggtatcggcatttcgctgctgtacttcggtgcgtccgagcctttggaccactacttcaacccgcctgaaggcgccgccgccagcaatggcgccgcccgccaggcgctgcaactgaccttcctgcactggggcctgcacggctgggcgatctatgccctggtcggcctggccgtggcgtacttcgcttatcgccataaccagccgctggccttgcgttcggcgttgtacccgctggtgggcgagcgttgggtgaaaggcgcggctggccatgcggtagacggctttggcatgttcgtgaccctgctgggcctggtgaccaacctggggattggttcgatgcaggtgtcgtccgggttggaaaacctgttcggcatgcagcacagcaacaccaacctgctgatcgtgatcatcgtgatgagcaccgtggcgaccatcgccgcggtgtcgggtgtggagaacggcattcgccgcctgtccaacctcaacatcgtgctgttcagcggtttgctgatctttgtgctgttgttcggcccgaccctgcatttgctcaacggctttgtgcagaacatcggcgactacatgaatggcctcgtgctgaaaaccttcgacctgtatgtgtacgaaggcgacgccgacaagaccgagcgctggatgggcctgtggaccttgttctactgggcctggtggatttcctgggccccattcgtgggcatgttcatcgcgcgtatttcccgtggtcgcacggtgcgtgagctggtggctggcgtgctgctgatcccgctgggctttaccctcgcgtggttgtcgattttcggtaactcggccctggacctggtgttgaaccacggtgccgtggagttgggcaagacggcgctggaacaaccgtccatggccatctaccaactgcttgagcattaccctgcgtcgaaaatcgtcatcggtgtgtcgatctttgtgggctttgtgctgttcctgaccccggcggattccggcgcggtgatgatggctaacttgtcttgcaagggcggcaacgtggatgaagatgcgccgcactggctgcggatcttctggtcggcggtgatcaccctggtgaccatcggcctgctgttcgccggcaacttcgaagccatgcaaaccatggtggtgctggcggggctgccgttctcggtggtgctgattttcttcatgttcggtttgcacaaggccatgcgccaagacgtcgcaatcgaacaggagcaggcgcagttggccgagcgtggccgtcgtggtttcagcgagcgtttgactgcgttggacctgcaaccgagccaaggcaccgtgcagcgtttcatggacaagcacgtcacgccggcgctggaagaagcagcggttgcgctgcgtgagcaggggctggaagtgcagaccttgctgggtaaatccaagcgctgcattggtgtgcggatcgaaatggccgagggcaacccgtttgtctatgaagtgagcctggatgcttactcgtcggcgccgagcgacttgcctgaagaagagcgcacccgctactaccgtgccgaggtgtacctgcacaacgggcctcaggaatatgacctgatgggctttgcccaggaacagatcacccgggacgtgctcgatcagtttgaaagccatcggcagctccttggccgtgtctatagctgatggttgagcttggcggcgccgtcactggcgccgctgtttcctgattggaatgcggtcaactgtgggagctggcttgcctgcgatagctctagtgaattcactgaagctatcgcaggcaagccagctcccacattgaccgcatttcttcagttggatttagcccaggtttttgccgagcagtgcgtgatacagctcgctatcccccaagatccccaccacctggttgttgttgtgcaacaccagcttgttccccgtgtggtaccgaatctgcagcgcatcgcgcatgccgatattcgaatccaccagtgtcggtacccggcccaaaccttccacggcttgccccggtgcccagttctgcagattcatcaccgcgccattctggcgggcgcccttgatggtgttgccttcggccaggtccagccaggaatcgccgcccggatcgaggcacactgagccgttaacccgcgtgcagttgtccaacgtgcgcatcaggctgcggccgcacagcacgttcagcgggttggtatgggcgacgaaggtgcgcacataatcatccgccgggttcagcacgatctcttccggcacgctgtactggatgatcttgccgtctttcatgatcgcgatacggctgcccagtttcagcgcctcatccaggtcgtggctcacaaacacgatggtcttgctcagcttgcgctgaagctccagcaattcgtcttgcaggccttggcgaatcaacgggtcgagggccgagaagggttcgtccatcagcaggatgtcagcgtccatcgccagcgcacgggccaggccgacgcgctgctgcatgccgccggacagctcatccggcttcttgttgcgccactgggccaggcccaccagttcgagcttttcatccaccagcgcgcgccgttctttctccgggcggccctgcatttccaggccgaagctgatgttctcgcgcaccgtcagccaaggcatcagggcgaacttctggaacaccatggcgatgcgcttggtgcgcatcattttcagctcggcgggggtgcaggaggcgatgtcgatctggcgaccttcatgctctacaaacagctggccacggctcacggtgttgaggccgttgatgcagcgcagcaagctggatttgccggagcccgacaggcccatcagcacacagatctcgcctttctcaatgtccaggctggctttttcaacgccaacaatctgcccggtctttttcaggatttcgttgcggtgcatcccctggtccagcagcttcaaggcttcgcgcgggtctttggagaagatcacatcgacattgtcgaatcggataatgctcatgcatcaccccctactttggcgtcgggttgtttgcagatgcggtcgagcatgatggccagcagcacgatcgccaggccggcttcaaagcccagggcgatgtcggcggtgttgagtgcgttgaccaccggtttgccgaggccgtcggcgcccaccagggccgcgatcaccaccatcgacaacgacagcatgatgcattgggtaatgccggcagcaatgctcggcatggcgtggggcagttcaatgcgcgagagcaactgacggcgcgagcaaccaaaggctttgccggcatccatcaactcttgcggtacatcgcggatacccaggtaggtcaggcggatcggcgcggcaatcgcgaacaccaccgtggaaatcaggccgggcaccacacccagcccgaagagggtcagggtagggatgaggtagacgaaggtcggtacggtctgcatcagatcgagcaccggccgcatcatggtgtagaacagcggtttgtgcgcggcaacaatgcccaacggcacaccgatgaccacgcagaccagggtggcgaacaacacctgggcgagggtttccatggtttcctgccagtaccccaggttgaggatcagcaggaaagatgcgatgacaaagacagtcaggccccacttgcgttgaatgaagtgagccagcagcgcaatcagaccgatcaatgccagcggattgaaccaggtcagcgcaaacgtcacgccgtggatcatcgtttccagggtcgatgcaattgcgtcgaagtagttggcaccatgtttggtcaaccattcgacgaaggcagcgatgtactggcctagtgggattttctgttcagtcagcatggtagtgaatgtccacatgcgaaggggaaaacatcccggggcagcgcaccgccccggggtcagcgattacttggcgagataagctttgacggcctccagacccggtttgccatcaacggtggtcacgccggcgagccaggtgtcgagcacttgcgggttggctttgagccaggccttggcggctacgtcaggtttttgtttgtcgtccaggaccttacccatcagggtgctttccatgttcagggtgaacgacaggtttttcagcaactggcccacgttgctgcattcctgggtgtaacccttgcgcacgttggtgtagatggtggcctggccgtaattcgggccgaacgaatcgtcacccccggtcaggtacttcatcttgaagcgggtgttcatcgggtgcggttcccagccgaggaacacaatggcctggtcgcgtttggtcgcgcgttcgacctgcgagagcatcccggcttcgctggactcgaccactttgaaacctgcggttttcaggccgaaagcatctttgtcgatgagggtctggatggtgcggttgccgtcgttgcccggctcgataccgtagatcttgccgcccagttcatccttgaatttgacgatatcggcgaagtctttaaggcccttgttgtacagcgcctcgggcacggccagggtgtatttggcgttctcaaggttggcgcgaacggtttccacggtgccggcatcacggtactgcttgatgtcgttttccatggtcggcatccagttgccgaggaagatgtccatgttcttgccatcagccagcgacttgtaagtcaccggcaccgaaatcatcgtggtgcgcggtttgtagcccaggcccttgaggacttcactggtggtggcggtggtgacggtgatgtcggtccagccgacatcggagaagttgacggtctgacattgtgccggttctgcagcgtgcgcaaggactggcagattcaacatggcggccaacaacaactggggtgaacctttcatggggctagactcctgtgttttttctggcggcctgcgccgcgctttataagggttgcggttggtgcgtgcggtgaagcgacggcacggtgccttgcaaacgagtcgagactgatcatgtaccagtgaaaatctgacgcctacagggggcgtcgtatccagtacagggatggtcgtatccagtgtcggtgacgtcgcttacagatttttccaacggcaaaactgcagtttttgccgatctgcaccgctaaaaacggccaaaacgccttatcgcctgccagcgacgttagtgagcatggtcacgtcggtgtgagacgccgtgatgacggataaaagcttgatgatgccgccatctgggcgatctgagcgtagcagctccgtggtgccaggcctgttcacccgaggagttgcacggcaatggctatcagcgttttcgacctgttcaagatcggcatcgggccttcgagttctcacaccgtcggccccatgcgcgccgcggcgttgttcgttcaagggttgcgtgagcgtgatgtgttggaacaagtgcggcgcgtcgaagttcagctgtatggctcgctgtccgccaccggcatcggccacggcagcgacactgccaccatcatgggcctgatgggcgagtggccggacgcaatcgacccgtcgcagatcggcttgcgcattcacaccctgcgtgaaaccgacaccctgctgctcgacggctacttgccggtgcctttcatctgggcgcgcgacatgcgcttgctcgacgaaaacctgccgttccaccccaacgccatgacgctggtggtgttcggcgataacggcgaattgcaccgcgacacctactattcagtcggcggcggttttgtggtggatgaagcccaggcgcaaagcggtgtggccgacatggaccgcaccgaattgccttacgacttttccagcgcggtggagctgttgcagctgtgcaagacccataacctgcgcgtcgcggagttgatgctcgccaacgagaaaacctggcgctccgaagaagaaatccgcagcggtttaatgaagctctggcgcgccatgcaagattgcgtggagcagggtctcaagcacgaaggcatcctgcccggcggcctcaacgtgcgccgccgtgctgccaagctgcaccgcagcttgcaggaattgaacaaacccaatgtgattggctcgaccctgagcgccatggaatgggtcaacctgttcgccctggcggtgaacgaggaaaacgccgccggtgggcgcatggtcacggcgccgaccaatggcgcggcggggatcatcccggcggtgttgcactactttatgaagttcagtgaagaggtcacagaagccaacgtggtcgattacctgctcggcgcggcggcggtggggattctgtgtaaaaagaacgcctcgatctccggcgccgaagtgggctgccagggcgaagtcggttcggcgtgcgccatggctgcggctggcttggcggaaatcctgggtgctacgccggaacaactgtgcaacgcagcggaaatcggcctggaacataacctcggtttgacctgcgacccggtgggcggcctggtacaggtgccgtgtatcgaacgcaacgcgatagcggcggtgaaggcgatcaacgcggctcagatggccctgcggggtgacggtcagcactttatctccctggaccgggtgatccgcaccatgcgcgacaccggggcggatatgcatgacaagtacaaagagacatcgcgtggtgggttggcggtcagcgccgttgagtgctgagaccgcgtcgactgcatcgcaggcaagccagctcccacatttgaatgtgttcacaaatcaaaatgtgggagctggcttgcctgcgatagcaatactccagacgccactgcgcataaagtgaacacccggatccaaaagcgccaccttttagcgcgtcgcaaacagataagtagcttccgaacgattctgcacctgaccacctgtcatccgtgcgagcggtgacagacttctcccatgcccgcaaagcgccttcccacaagtgctaccgatctgctcacaccccgtgggcggggccggtctgacgtccatttcgagccctatcccgtactccccgcgcgggcttatatagacgcgtcatcaggtcgttttcaggagttattggatggccattcaactttaggcatggcatttgctctatcaattcaaagcctcgctcctcgcaggagacgagcgcaataacaagagcctcgcctgaggccatcacccgctttgtgtgaggagataccgcgatgacgtcgttcaactcaggggcccaaccccagaaccgtgcgcctcaatccatcggctttttgctgctggacaatttcacgctgatttccctggcgtccgccgtggaaccgctgcgcatggccaaccagctgtccggccgcgagctgtaccgctggacgaccctgagtgtcgacggtaaccaggtgtgggccagcgacggtctgcaaatcacccccgatgcctccatgcacaaagccccggccctggacacagtgattgtgtgcggtggtgtgggtattcagcgcaccgttacccgtgaacatgtgtcgtggctgcaaagccaggcgcgccagtcccgccgccttggcgcggtgtgcaccggcagttgggccctggcctgtgcgggtttgctggatggttttgattgcagcgtgcactgggaatgcctggcgtcgatgcaggaggcgttcccgcgcgtggccatgagcacacgcctgttcaccctcgaccgtaaccgtttcaccagctcgggcggcaccgcgccgctggacatgatgctgcacctgatcagccgcgaccacggccgtgaactgtccgcagccatctcggaaatgtttgtgtacgaacgcatccgcaacgaacaggatcaccagcgcgtgccgctcaagcatatgcttggcaccaaccagccgaagctgcaggaaatcgtcgcgctgatggaggccaacctggaagagccgatcgacctggacgaactggcagtgtacgtcgccgtatcgcggcgtcagctggagcgcctgttccagaaatacctgcattgctctccctcgcgttattacttgaagctgcgcctgatccgtgcgcggcagttgctcaagcagacgccgatgtcgatcatcgaagtggcgtcggtgtgcgggtttgtgtccacgccgcacttctccaagtgctaccgcgaatacttcggcattccgccacgggatgagcgcgtagggtccaataccacccagcaagtggcgatgatgccgattccgcaggcgctggtgttgtcaccgttgtcggggccgatgtcggcgttgagccaggcgcgtaatgagtcgacgtttgcgagtgtaaggctctagaccgagtcgccttcatcgcaggcaagccagctcccacatttgacggtgttcacaaatcaaaatgtgggagctggctcgcctgcgatagctttctatcaggcaccaaagttctgtttgaactgcaccaaagccggcaacaactgcttgtcgatcgcctgcctcaccgccggcaatatcgtcgcactgccggtgtacatctgttccaccatgcccttgagtgccttggcccttgccgcactcaaaccgcgtactgcgcactcgcaagcctgttcggcagtggcaccgctggacacttcaaaacccagcgagcgcaggtggcccagcaggtcatcctggtcaatcaaatccgcgtgcatcatgacgtttatcctggtgtagggagcgggtctgaggttgattctggtaggccatctgccggtgggcaagggcagaatcaatgaatggctcagatggctatgaacaggtcgttttcgggtcatttaccgacagaagtaaaaggcacactgaatgccagcaagcagcttgaaggtttggtcaccctcgggatgtcacgctcacacccagcactctgccccggtcttgtcacggcttgatcggggctttttttggctgggatttggggtggctgtactggccccatcgcaggcaagccagcttgtatgctaggacttgaagggaggaggagggacaaagccagattctgactgttggcgcagtacagaccgtgggagatttcgcccctcctcctttcacccaagcgccgataaagaatgcatctggctatgaccgacgataggaacaagcctgcgcctctgggtgagcccttcaagtgctcaaaaccttagcccggaggaagtcactatggcaatgccagttcccgtctccaagccgattgttggtattgatgtcgcaaaaaatgaattggtgatttatcacgccgatctcgattttttggaagcaatcccgaataccaaagccgctataaaaaagtggctgggggctttgccaggcagcgttgctatcgccattgaggccaccaacacctaccacttggagtttgctgatctggcctatgaagctggctgcgttatctacatggtcggtggttatgaactcagtcattaccgcaaaagtgtgaaggttcgtgccaaaactgatgccctggatgcccaattactagcacggtatttgcgaaaagaagccgacgagcttcgcccctggacaccgccgtcccctctttatcgccaactgttgagccttttccgccgccgtgccgccctggttcaagctcgcgtcagcctgacgcaaagctgggcgaatgaaccgctgttgaaggcctcttttgccgagcaaatgaagtcgatgcaaagacttgaaggactgatcgaaaaaatgatcagcgatcgactgaaagaggctgggttactgggccaactcaaacgttgcatgagcgttgaaggtatcggctttttgaccggggcccgcttgattaccagcttccagcgaggtgactttagaaatgcggacgcatttatcgctttcttgggtatggacttgcgcgtctccaagtccgggcagaaagataatcggcgcagtttaagcaagcgcggcgactcagaagcgcggcgtcttctgcataacgcagcaatggcggctagccggactgcagcatggacagagttttaccagacgcagcgggcacggggatatagcaccactcaggtactggtaatgttggctcgcaagcttgctcgggtggtatttgccttgctgaaagggcaaaacgaataccaaccgaaggttggttgagggttgctccccaaccatagaatctcccacctttaaccgtgttccacctttggaatgcattctcctgtgggagctggcttgcctgcgatggccgcaactcggtctaccgctgtaacaccagaatcctggagagcaactcatcccggtcgatgtaacacccctgaaaatgccgggcccccgacgccggatcaaacgcattgcgcgcatgcaacgtccgccgattatcaaagcaccacaactcccccggattcagccgttgtaccacacgaaaacgctcctcccgcgtcatcgcaataaaccgccgataagcccgatacaacaacggcatctgctccacactggtttcaaatggcccacgcagaaagttggccatgcgaatctccgccacatcacccaaagcatccagcgcaatgatcggtgccagtcgccggtagtcgctgtgacggtctttattgcgaaactccaccgggatttcacacaacgcgcgaaacgcctcgaggtcttccgtacgcaaggcgttggcgatggcaaacccgtcgacaaaaatactctcgccaccgtcggcatcgttcaccaggcaatgcagaaattgcagccccggttgcagctctcgtgtcggcaaatcgctgtgcaggggcaggttgaaagcggtgtaggcgttgctgtcggcgtcggctttggattgcacgttgaacagcacgccgaagttgctctcgcggataaacgaaatgcgcttggcgatcagcgccagggagccgggctcggtgggtacaccacggatttgcgtcaggccgctgtcgcgcacggccagcagccattgcaacaacgcctcggggtcttccatcacggcggcgtagtcgaaaaccggcagcgagaaggtatggttccacagcagaggtttgggctttgccgcgcggcgctcggcgcgtgattcatcgtcgtaggcgtgggcgcgcagccagccggggtcgtaacggctgtgatggccgccgctccattgcacgctgagaaaaccctgatcgatgtgcgcgctgacggcgctgagctgttcgtccacatcgacgatttccagcacctgttcgcgggtcacgctgtacacgcactccgcacatgggcagttgtcgcgcagccactggtgatgaaacgggctggcccttccatccgcccaatgcacaaggatctgatcctccagcactcgcgcatccgcgaggtcgctgatttttgggtaagtacgaaaatcggcaacagcggcggcggtttgcatggtcgctccttattgttttttgggtggcaatccaattacccggctgagcagggcaggacgcggcagatcggcctgttcagcgctgatggctgtgagcttttcaagcgtggcctcgctgaacggcgccgaatgcgggccggcgaggtcgacgtgcagcagcatctgttcattgcccgccaattccttctcgtcgcccaccaggtgcaggctgtgatagaggtgcaggcgcttggcgtcatgggcgatcagttgggtatgcacctccacctcggcgccgagtttcacttcgtgcaggtagttcaggtgcagctccagagtgaacagcgagtggccgctggcttcgcggttttcactggtaagccccagcgtgtccatcaaggcgtcggtggcgtagctgaagatcagcaggtagaacgcatcgcgcaagtggctgttgtagtccacccagtcgggctggatgtgggtggtgtacgtcgtcagtgcaggcatcgcatatgtcccggacagttactcggtcaaaatgtgggagctggcttgcctgcgataacggtggtgaatgttgcatcgccatcgcaggcaagccagctcccacatagaatcaacagcggttattcggcgaagctcatgccgtgtttttccttggtggttttcacggcctccagcaccgccagcaggcaatcatcacgatagcgctccagcgccgaaatgctgtgtttgcccaactgatcgctggtgccatcgaccacatcgtcaatcaacttgtcggtcagctccggcgctggcaggtaagtccagggcaactgcaacgccgggccaaactgcgccatgaagtgccgcatgcctgcgtcgccacccgccagggtgtaggtcaggaaagtacccatgaacgaccagcgcaggcccgcgccaaagcgaatcgcgtcgtcgatttcgccggtggtggccacgccgtcgttcaccaaatgcagcgcctcgcgccacagcgcttccagcaggcggtcggcgataaagcctggcacttccttacgcacatgtagcgggcgcatgccgagggattcatagactttgattgccgcttgaatagcctccggcgcggtgttcttgccgccgaccacttccaccagcggaagcaggtaaaccgggttgaacggatggccgaccacgcagcgttccgggtgaatcgaaccctcgtagaactcgcttggcaacaggccagacgtgctcgagccgatcaatgcattcggcttggccgccgcgctgatcttgctgtgcagttccagtttcagttccaggcgttccggggcgctttcctggatgaagtcggcgtcttttacgcactcttcgatggtggcgacgaagcgcaggcggtcctgggaggcgcctggcgccaagccttgtttttccagggcaccccaggcattggcgacacgtttgcgcagcgcggcttcagcgccgggcgccgggtcccaggccactacatccaggccgtgggcgagggcgcgggacacccagccgctgccgatgacaccgctgccgagggcggcgaaggttttgatttcggtaataaagctcatgggcgacagtcctgaaaagttcggtgattcattgtggggtgtgggttagccgcgcttggtcaggcccatcttcacgcggccttccgccggggtcatgacccgcgcgcccaggcggctgaggatttcactcgcgcgctccaccagctggccgttggtggccagcacgcccttgtccagccacaggttgtcttccaggccgacccgcacgttgccgcccagcagcaccgcttgcgcggccatcggcatttgcatgcggccgatgccgaaaccggcccacaccgcgtcggcgggcaggttgtcgaccatcgctttcatggtggtggtgtcggccggtgcgccccaggggatgcccaggcacagttggaacagcgggttgtcgagcaggccttccttgatcatctgcttggcgaaccacaggtggccggtgtcgaatatttccagctcaggcttaacgcccagctcttgaatacgtttggcgccagcgcgcaattgcgccggggtggacacgtaaatggtgtcgccatcgccgaagttcagcgtgccgcaatcgagggtgcagatttccggcaacagctcttccacgtgggccaagcgggtcagcgggccgaccaggtcggtgttggggccgaactccatcgggttttcgccgccgccgatttccaggtcgccgcccatgccggcggtgaggttgacgatgatgtcgatgtcggcctcgcggatgcgctccatcacttcgcggtacagcgcgacgtcgcggctgaacttgccggtttgcgggtctcgtacgtggcagtgcaccacggtcgcgccggccttggcggcttctacggcagcggcggcgatttgtttgggagtgacgggcacgtgtgggcttctgccggtcgtgtcgccagcaccggtgagtgcgcaggtgatgatgacgtcgtggttcatgaggcggttccttacaggcgggcgtagtggtgccgttcgcagccaacagcggctgcgacacggtgattcgaatcaggttatttgctggtcagttgcaggttggccgcggcgggcttgccgtcgaaggtggtcacgccttcgagccagcgctgctggtcttgcgggtggtccttgagccactgcttggcggactcgatggcgtccttgtgatccagcaacggctgcatcatccggctctcgtcggcggcggtgaaggtcaggttggtcagcaacttgtgcacgttggggcattgttctgcgtaggtcggcgaggtgacgctccacaccgtggccatgccttcgttcgggcccagcgcgtcgtcgctgccggtgaggtaggtcatggcgacgttgacgttcatcgggtgcggcgcccagccgaagaacaccacggcttctttgcgacgcacggcgcggtcgacggcggcgagcatgccggcttcgctggactccaccagctggaacttgcccaggccgaactggttcttggcgatcatcgccttgatctgcgtgttggcgcccgagcctggctcgatgccgtagatcttgccgcccagctctttctcgaacttggcgatatcggcgaacgttttcaaacccttgtccgccaggtaagtcggcacggcgagggtggcacgtgcatcttccaggctcggtttgtcgaggactttgacttgcttggcgtcgacgaacggggtgatggtctgggtcatcaacgggttccagtagccgaggaacaggtccaggcgctggtcgcggatgccggcgaagatgatttgctgggaggcgctggtttgtttggtcttgtagccgaggccgtcgagcaacacttgggtcatggcgctggtggcgattacgtcggtccagttcaccacgcccatgcgcacgttccggcaggacgccgcgtcggcggccatcacgttggtgctcaaaatggcgctggcgctgagtgcaagcacgcagcggctgatcagtcggttcatggtggatccctcggcaggtcgttattgtggggtccggcgtctttgtgcgccgtgaggccaagttacgcaagccagggggcgacaaaacgcacggcggcgaccagctcttgcactgcagcgacctgcccccttgaatccacccgagaacgggagtatcacagtgccacgctgcccgcacgacgagagcgccaccatgtcccaggatttctactttttgctgatgccgggcttctcggccattggctttatctccgcgctggaaccgttgcgagtggctaaccgctttcgcggcgagctgtaccgctggcacgtactgagcgcagacggcggtgcggtgctggcgagcaatggcatgtcggtcaacgccgacgccgcgctggagccgctgaaaaagggcgcgacgctgatggtggtcgcaggctttgagcccttgaagttcgctacgcccgcactggaacactggctgcgacgccttgatcacgacggcgtgaccctcggcgccatcgataccggcgcctgcgtgctggccgaagcgggattactcgacggccaccgcctgaccctgcactgggaggccatcgacgccttcaaggaatcctatccgcagctcacggtgacccaggaactcttcgaaatcgatcgccgccggatcacctgcgccggcggcacggcctccatcgacctgatgctcgacctgatcgcccaggcccacgggccggagctggcgatccaggtgtccgagcaatttgtgctcggccgcattcgcccgcgcaaagaccaccagcgcatgcagatcgccacgcgttatggcatcaacaacaagaaactggtgcaggtgattggcgagatggaacagcacaccgagccgccgctgagcactttggcgttggccgacgcgatcaaagtcacgcgccgacagctggagcggctgtttcgtctgcatctcaatgacacaccgagcaacttctacctcggcctgcgcctggaaaaagcccggcagctcttgcgtcaaagcggtatgagtgtgctggaggtgagcattgcgtgcgggtttgagtcgccgtcgtatttcacccgcagttacagggcgcggtttgcgaagtgcccgagggaggatcggcgacgggaggttgtttgagaggcaattatagttaattatactcacggctataatttatagttctttcgataattgagtataaaggcatgtccaagcacagcggctttgtgttccgccgccccactctggccagcagcatcgccgacggtctggtgggggccggtcttcaggatttcacctcaggcctgtttcttgcggcgcctcggcgtaccggcaaaagcacctttttgcgtgaagacctgattccggagtgtcagctgcgaggttggctggccgtgtatgttgatctgtgggctgacaaagacaaagatcccgcagagttgatcgcaagcgcgattgctgcggccctggcgccctatgaaaagggcattcgcaaactcgcgaagaacatcggcatcgagaaactcagctttttgcgcaccctgtcctgggacttcagcaagccgcaattgcccgttggcgcaacgttgacccaggcgctggagttgctgcaccacgctgcggaaaaacccgtcgtgctggtgattgatgaggcgcagcacgcgctgacgagcgattcaggcatcaatgcgatgttcgcactgaaggccgcccgcgatcagctcaaccaggggcgtgatgaagacggcagcggcttgcacctggtgttcaccggctccaatcgcgacaagctcgcacatttggtattgggtaaaagtcagccatttttcggctccagcatcacgccgtttccgctgctgggcaaagaattcacccaggcctacaccgtgcacctcaatgcgcacctggcccagactaaccagttcaacgctgccgacattgatgaagccttcgaattggtgggccgccgcccggaaatgctgcgcaccatcatcggcgaggtcgcgttggagttgggcgaggcgaataatttggggcagttgttgcacagccgtgccgagctgttgcgcgcgggggtatggacagagtttgaaagcgcctggaacgccctgaccatcgcgcaacgtgccgtactggaggtgatggtggaacgttcgcagagcaacgagccctttgcaccgtttaccgacagcaccctcacggcggtcagcaaaaagctggaagagaggggcagcgatgtggtgccgggcacccagacgattcaagcctgtattgatgcactgcgcgacaaggagttggtgtggaagtctggccggggtggttatgcgctggaggacaagacctttgctgattggctgcagcacaagaaccgtactcccaactagatacaacgccgattaactgtgggagctggcttgcctgcgatggcggtgtatcagtgaaaacatgtgctggctgacccaccgctatcgcaggcaagccagctcccacatttaatttctgcagtggcttatttctttagcagggccgaacacgccgctttgtaggcttcatgctggtacttgttcagcgtcgctggcagttcaaagttgtgtttcttgttctgtgcattaatggtctgcggcgacagcagcgtcacctccacaccgtccagcaactgaaacaccccttcaatcttgaacgtcgtcgggccgccggcgaattcgcctttcttgctgcgctttttgatcgcgatgcgggtgatggcgtttgcttgcacgaacgccttcacctgggcggagaaggctttgacgttggccgcttcatcgtcgtcttccagagagattttcttggtggccagggcgacatgggccagcgccccgttgtccagggaagcgacagcgatgatggcttcgctgcctttgatttcgatgccgcagagagtcattttcgagcctatggaatgagagggggtcagtagtagcgatcttcggctttgtgctgatagatccggtgcacggtccacaggatcagcatccagcacacaatcattaagccgctgctggcgctcatgatgtagaaattaggcgaactcgaatgaaagttggcctggatgttatgcaccgttggaaaccattttgaatacaccacggcgacctcgtcgccgacttcgtaaccagggtcttcaacgaagctgttgttattcaccatgccgtcttcgcgttggccttcatggctgaacgagtaataaacattggtgcttgcatttcgcgggccgacgctttcgatttgagtgatttccccaactgcttctacgggggctgccttgatcagtccgtgtggtgcaccccggctgaccgacagggacagcatcagtgacagtatcaatgtgaatagaaacagcagaacagcgcgcgtgaacaggtaatcccgttccgcttcgcgggcgtaatacatgtgaattccttttcaatgttccaggcggtgtcaggcctgttattcctgcccgatcgactccagaaactccgaccgttcatcactcatccgcgccaggcaatcattctgttgaatcgcatattccttgctgcccgtcaccgccgggaaggtatccactgcgcaatcggcatcacgcaatttttcccacttctgctgggcatccttcagacgagcggtaatgtcagccagttgggacttgttgctgccataggtcgaacccatgcgttccagcaggccttgatagttatctttgagcaattggtccgcggtggtcttgttaaaggtggcgcattccagggtttgcttgtcgttttcaatgccatcgcacggcgtgttgtcggtgtcttccgccgcgtgggcggtggttgcgatgagtgccaaagccaggaaaatcgatttcattgcgccgtctcatatcaggtgatgacgcaaattctggctcaagcgtgggacaaagaacagccgccagccagagatgtcatgtaggcctttgtcgcggattgacgctttcggcaattcccctgtcgtttttgcacccggctctgtcggcccctgggcatatgctggccccaaagcgccggcagacgattcggcgcatgaatcgccaataaggggacgcctgatgagcccagccgaattgcacgccgacagcatcgttatcgacgggctgatcattgccaagtggaaccgcgacctgttcgaggacatgcgcaaaggtggcctcaccgccgccaactgcaccgtgtcggtgtgggaagggttccaggccaccatcaataacatcgtggccagccagaccctgatccgtgagaacagcgacctggtgattccggtgaaaaccaccgccgacatccgcaaagccaaggaactgggcaaaaccggcatcatctttggcttccagaatgcccacgccttcgaagaccaactgggctacgtcgagatcttcaagcagctcggcgtgggcgtggtgcagatgtgctacaacacccagaacctcgttggcaccggttgctacgagcgtgatggcggcctgtccggctttggccgtgaagtcgtcggtgagatgaaccgcgtcggcatcatgtgcgacctgtcccacgtgggctccaaaacgtccgaagaagtcatcctcgaatcgaaaaagccggtgtgctactcccactgcctgccgtcggggcttaaagagcacccgcgcaacaaatccgatgaagaacttaagtttattgcagaccacggcggttttgtcggcgtgaccatgttcgcgccgttcctggccaagggcatcgactccaccatcgacgactacgccgaagccatcgaatacaccatgaacatcgtcggcgaagacgccatcggcatcggcaccgacttcacccagggccatggccaggatttcttcgaaatgctgacccatgacaagggctacgcccgccgcctgaccagcttcggcaagatcatcaacccgctgggcatccgcaccgtgggcgagttccccaacctcaccgagaccctgctcaagcgcggccacagcgagcgcgtggtgcgcaagatcatgggcgagaactgggtcaacgtgctcaaggacgtctggggcgaataagccaccactgacacttcttttcccctggccatccggcgccgggggcatccaaacgaattttctggagttaagtttccatggccaagatcgccccgcaattgcctatcgaagtcgacagcgaaaccggtgtctggacctctgacgcgctgccgatgctgtacgtgccgcgccatttcttcgtcaacaaccacatcggtatcgaagaagtgctgggcgccgatgcctatgccgaaatcctctacaaagccggctacaagtccgcctggcactggtgcgagaaagaagccgaatgccacggcctggaaggcgtcgcagtgttcgagcactacatgaagcgcctgtcgcaacgcggctggggcctgttcaagatccaggacattgacctggacaaaggcaccgccagcgtcaagctggaacactcggcgttcgtctatgtgtacggcaaggtcgggcgcaaggtcgactacatgttcaccggctggtttgccggcgccatggaccagattcttgaagcgagtggcagcaagattcgcaccgttgcagagcaagtctacggaggctccgaagagggccacgacgacggcctgttcaccgtcaagccgttgtaagccgaggaccgtgccatggctttcgaagcaatgttccagccgatccagatcggcaagctgaccatccgcaaccgcgtgctcagcactgcccacgccgaggtgtatgccaccgacggcggcatgaccactgaccgctacgtgaagtactacgaagagaaagccaagggcggcatcggcctggcgatctgcggcggctcctcggtggtggccatcgacagcccgcaggagtggtggagttcggtcaacctgtccaccgaccgcatcatcccgcacttccagaacctggccgacgccatgcacaagcatggcgccaagatcatgattcagattacccacatgggccgccgctcacgctgggacggcttcaactggccgaccctgatgtcgccgtccggcgtgcgtgagccggtgcaccgggccacctgcaagaccatcgagccggaagaaatctggcgcgtgatcggcaactacgccagcgccgccaagcgtgccaaggccggtggcctggacggtgtggaactgtccgccgtgcaccagcacatgatcgaccagttctggagcccacgggtcaacaagcgtaccgacgaatggggcggcacctttgaaggccgcatgaagttcggcctggaagtgctcaaggccgtgcgcgccgaagtgggtgatgacttctgcgtgggcatgcgcctgtgcggtgacgaatttcacccggacggcctgtcccacgaggacatgaaacagatcgccaagtactacgacgacaccggcatgctcgacttcatcggtgtggtggggtcgggttgcgacacgcacaacaccctggccaacgtgatccccaacatgagttatccaccggagccctttttgcacctggcggccggtatcaaggaagtggtcaaggtgccggtgctgcacgcgcagaacatcaaggacccgaaccaggctacgcgcattctggaaggcggctacgtggacatggtcggcatgacccgtgcacacatcgccgacccgcacctgatcgccaagatcaagatgggccagattgaccagatcaagcagtgcgtcggcgccaactactgcatcgaccgccagtatcaaggcctggacgtgctgtgcatccagaacgccgcgacctcccgcgaatacatgggcgtgccgcatatcatcgagaaatccagcgggccaaaacgtaaagttgtggtggtcggtgccggccctgccgggatggaagctgcgcgcgtcgccgctgagcgtggccatgacgtgacgctgtttgaaaagaaagagtttatcggcgggcagatcaccacggcgtccaaggcgccgcaacgtgaccagatcgccggtatcacgcgctggttccagctggaactggcgcgcctgaaggtcgacctgcgcctgggtgtggcggcggatgccgacactatcctagacctgcgcccggacgtggtcgtgctggccgtgggcggcaccccgaacgtcgaacagaacgaacactggggcgcggccgaaggcttgatcgtcagcagctgggacgtgctcgacggcaaggtggcaccgggcaaaaacgtattggtgtacgacaccatctgcgaattcaccggcatgtcggtggcggatttccttgcggacaaaggcagccaggtggagatcgtcaccgacgacatcaagccgggcgtggccatcggcggtacgtcgttcccgacttactaccgcagcatgtaccccaaagaagtgatcatgaccggcgacatgatgctggaaaaggtctaccgcgaaggcgacaagctggtggcggtgctggagaacgaatacaccggcgccaaagaggagcgggtggtggaccaggtggtcgtcgagaacggcgtgcgcccggacgaagccatttactacgccctcaaggaaggctcgcgcaacaaggggcagattgacgtcgaagccctgttcgcgatcaagccgcaaccttgcctgagcgaagcgggtgatgggtacttgctgttccgcatcggtgactgtgtggcgcagcgcaatacccacgctgcgatctatgacgccctgcgcttgtgcaaggatttctaggccaccaccgaaccactgtgtactcgatctaaatgtgggagctgatcagtgtgggagccgggcttgcccgcgatgcaggcgactcggtcttgagtgaaaccgaggcgatgccatcgcaggcaagccagctcccacattgatccggttcccatgcaagacctgtgtggtctttgggagcttcaccatgttgaacaccttgcttcccattttattatttgccgccctgggccttgcggtcctcggcgcccttcggcgagccgcgatgtggcgccgtggccgtgcgtccaaagtcgacttgctgggcggcctgctggctatgcccaagcgctacatggtcgacctgcaccatgtggtcgcccgcgacaaatacatcgccaatacccacgtcgccacggcgttgggctttgtgctgtctgcgctgctcgccattctggtgcacggtttcggcctgcataaccgcattctcggctacgcgctgctgctggcttcggtgctgatgtttgtcggcgcgacgttcgtgtacctgcgccgccgcaatccgccgtcgcgtctgtcgaaaggcccgtggatgcgcctgccgaaaagcctgatggcgttctcggtgagcttcttcctggtgaccctgccggtggccgggattctgccggctgacttcggtggctggctgcttgctgcgctattgagcgtgggcgtgctgtggggcgtgtccgaaatgttcttcggcatgacctggggcggcccgatgaaacacgccttcgccggtgccttgcacctggcctggcaccgtcgcgccgaacgctttggcggcggccgttccaccggtttgaaaccgctggacctcaccgacaaaacggcgccactgggtgtggaaaaacccaaggatttcacctggaaccaactgcttggcttcgacgcctgcgtgcagtgcggcaagtgcgaagccgcatgcccggcgttcgccgccggccagccgctgaacccgaaaaagctgatccaggacatggtggtcggcctggccggtggcaccgatgccaaatttgccggcagcccgtatccgggtaaaccggtgggcgaacacgctggcaacccgcatcagccaatcgtcaacggcctggtggacgctgaaaccctgtggtcgtgcaccacctgccgcgcctgcgtggaagagtgcccgatgatgatcgagcacgtggacgccatcgtcgacatgcgccgccacctcaccctggaaaagggcgcgacgccgaacaagggcgccgaagtcctggaaaacctgatcgctaccgacaaccccggcggttttgcgccgggtgggcggctgaactgggcggcggatttgaacctgcccttgctcagcgaaaaaggcacgaccgacgtattgttctgggtcggcgacggcgccttcgacatgcgtaaccagcgtaccttgcgtgcgttcgtcaaagtgcttaaggccgccaatgtggacttcgcggtactcggcctggaagagcgtgacagcggcgacgtggctcgccgcctgggcgatgaagcaacgttccaactgctggccacgcgcaatatccagaccctggaaaagtactgcttcaaacgcatcgtcacctgcgacccgcacagcttccatgtgctgaaaaacgagtacggcgccttcaacggcaactacctcgtgcagcaccacagcaccttcatggccgagctgatcggcgagggcgcgctgaacctgggccagcacaagggcaacagcgtgacctatcacgacccgtgctacctgggccgctacaacggcgaatacgaggcaccgcgtcaggtactgcgcgcgctgggtatcgaggtcaaggagatgcaacgttcgggcttccgttcacgctgctgcggcggcggtggcggggcgccgatcacagacattcccggcaagcaacgtattcccgatatgcgcatggacgacatccgcgaaaccggcgccgagctggtggccgtgggttgtccacagtgcacggcgatgctcgaaggtgtggttgagccgcgtccgttgatcaaggacatcgccgagttggtggccgacgcgttgcttgaagacactgcgccgactaaagctcctatcaagcgtgaacctgcggaggtgcactgatgagcgacattatccgccgcgatccacgcgctgagtggatcgcccgaaaccgtctgcacccgctgcatgcggcgatgcagccggtgcaacacagctggatggggcctaacggcgtcatccgcaagaatgtgcatggtgtcggttttatcggccccaacggcatcaagcgtatcgaccgcagcggcgcccagcagggcggcgcggccaagcgcacggcggcggtggacgtgcagttgccgttgcaccaggttccagcgcctgcgttctatatcaacgtggtgccggatatggttggcggccgcctgagcagccacgaccgtgacttgctcggcctggcacgccagttggcgagcagtgacggtgcggtgctggctgtggtgtttggcgaacacaaggaaagtgcgtttgccacggccggtgttgatcgcctgctggtgctggaaggccacgcattcgacggttattcaccggagcaacgcgtgcagggcctgcgggctgtggataaccagttcaacccgcgccattggctgctgccggacagccgcagtggcggcggcgaattgggccgacgttttgctgcgagcctcaaggagcgcccggccacacgcgtctggcagatcaagggcgaggagtgcatcggtcgcgccggtgcgggccaggaagatctggctcggccactgccacgcctgatcctcgccgccggggaatgcgccgaaccggtcagcgaaacccgtcacgaagttctgcccgtggagttatccacacccttggcgcgcagcctgccacgtattgaggatctgggtgcggtggcggtggacccggcagcgattcccatggccgaagccgaattcattttctctggcggcaacggtgtgaaggactgggcattgttccaccagactgccgccgcattgggcgccaccgaaggcgcctcaagggtggcggtggacgatggcttcatggcgcgtgatcgccaggtcggcgccagcggcacctgggtgacggcgcgagtttacgtggccgtggggatttccggggcgatccagcacctgcaaggcatcggtgcctgcgacaaggtggtggcgatcaacctggaccctggctgcgacatgatcaagcgtgccgacctctcggtgatcggcgaaagcgccgcaatcctgcaagcgttgattgcggcggtcgaagcctaccgcaacggcgccaagcgcgatgcagcttaaggaaatggccatgaccacgaatgtaatcagcctggtgtccatcggcgcccacccgacttccgggcgcccgcgccgtgccgagcaagacgcgcgagctgtagagctgggcctgcaaatggctggggataagttgcaggtgttgcacgccggcaacattgctgagccgaccctgcgcagctacctgggcatggggttgccgcagttacacgtgctggagcaaccggcgggcagcgatgccttgcccgtgctcagcgaatacctgcgcgacgccggtgcccaggtggtgcttgccggcagccaggccgaaaccggtgaaggctcaggcatgttgccgtacctgctggccgagcaattgggttggccgctgattgtcgggctggcgcaggtcgagtccatcgacggcggcgtggcccatgtgctgcaagccttgccacgcggccagcggcgacgcctgaaggtgcgcctgccgtttctggcgacagtggataacgccgcgcccaagcctcggcagagtgcttacggcccggcgcaacgcggtgagctggcggcccatgaagtcgaaatcgaacaggacgagttattcacaggcgccgtgctgcaaccggccaagcctcgccccaagcgcctcaaggtgatcaaggccaagagcggtgctgaccgcatgaaagccgccacggccaaggccagtggtggtggcgggcaagtgctcaagggcctgagcccggaagcgggcgccgaagctatcctcaagctgctcatcgaagaaggcgtcgtacgctgattccctgtgggagcgggcttgcccgcgaaggcgtagtgtcagtccacgcatttgtcgactgatacaccgccttcgcgggcaagcccgctcccacattggtttttacggtgtctgttggattacccacaatccctgttgacccgtctgtggataacctgttcgcggttgtccacaccccctgtgaatcaagccctccagccctctgtacgaaaaacaaccaggctaactgacggtttttcctgggttttctcactgaataactttgagcccttgtacagacttgcccccaaagtctgttggcgcttctgtggataagatgttcgctattggctaagtcccttgtaaatagaggctttcagtgagttggttgaaatatgaccaattcgtgtctttgaccgacttaaatccctgaatgccccggtttatgaaggtttgacgtggttttccacagcgtagccaaagttgcccccaaagtctgttggtgcttctgtggataaggtgttcgcctactgctgtaggccaagcattccgtggcttgtagggtattgatcaataaatgatcaggtgtgcgtaaaacccgtcaatttaaataagtcacggattttcttcatttaattttgggaggaaggcgcagttgcccacaattgctgtgggtggctttgtggataagttgttgggcaaaggctggagggcagagcgctaaagggctccaagagagttgatcagattatgaacaatatggaaatacaaatgtgggagcgggcttgcccgcgatggctgcagtgaattcaccgccgccatcgcaggcaagccagctcccaccgtcttgtctgtggtgtgtcagttactcatgtaccgccacacctttgaggtaaggcgccggcgccgcccccaggttgctcagcaaccgctcgctgtaccaatccacaaagttcaccacaccgaactcatacgtcttggagtaagggcccggctggtaagcagtcgagttgattccgcgctggttctcttcggccaggcgacggtcctggtcgttggtggcgtcccacacttggcgcatgcggtcgacgtcgtagtccacaccttccacggcgtccttgtgcacgatccacttggtggtgaccatggtttcctgggcgctgatcggccacacagtgaacacaataatgtggtcgcccatgcagtggttccacgagtgcggcaggtgcaggatgcgcatcgagcccaggtccggattcttgatgcggcccatcagcttggcgcagccttgtttgccgtccatggtcatcgacacggtgcccttgagcagcggcatgcgcacgatgcggttacgcaggccgaagctggcgtgggcgtaagggatcttctcggcatcccaggcggcagcggaggcagccacgtggtccttgaaggcctggtcggcgcgtgggtcggtgacgtcgtcccattccagcagggttttcagcagttctgggtgcgacgcgttgcagtggtagcactcgcggttgttttccagcaccagcttccagttggctttttcgaacaaggtggtggtgatcgccaccttggtgttctccatgtcgtacggttccatgtaatggttcagcgtcgacaggaagtcatcaatggccggcgggttttccgacaggctgatgaaaatgtaaccaccggcggtcttcacgttgaccggcttaagaccgtattgcttcatgtcgaagtcggcgcccatctcggtgccggcgaacagcaggcggccgtccagctcgtaggtccactggtggtaatggcacaccagtttggcgaccttgcccttgtcgctggtgcacaggcgcgaaccccggtggcggcacacgttatggaacgcgtgcaccacgccgtcggcgccacggatgacaatgatcgggttcttgccgatttgcagggtgatgtagttgcccttggtggggatctcgcaggtcatgccggcgatcaaccactctttctggaaaatttcctgcatgtcgatatcgaacagccgttcatcagagtaaaacggctgcggcagcgaaaaggtgcgctcgcgctcttgcagcatttgcgcggtggccttgcgtgcgggttccagcggatcgcccaagcttaaggttgcggtgacgtccatcgtgtatgtcctcatggccattctgtgtggccgagataagtggctgatcaggtgtgcagcaaggcgtaaagaaagcgtcgttgtctgaagcgagtgtggggccgctgaacaccagaaccttgtccattagcgacatggcccactctgatcccgacgcgcaagccccgtggtatgggggctggtcgcgataagtatgtgaatgtcgcagataggtaaatgggcggttccggcgttacgcagaatcgccaccatcaggccgacgcacggctacggagaacaccatgtccaataatttcctgaatccggtaaccacccagacctgggccaatggccggcacatcgtccgttgcgtcaaagtcatccaggaaacctgggatgtgcgcaccttctgcttcatggctgatcagccgatcctgttcttcttcaagcccgggcagttcgtcaccctggagctggaaatcgaaggccagccgatcatgcgttcctacaccatttccagctcgccatcggtgccttacagcttctcggtgacgatcaagcgcgtgccgggcgggcgcgtttccaactggttgcatgacacgttgcacgaaggccaggaactggcggtgcacgggccggtcggtctattcaatgcgatcgacttcccaagcccgaaagtgttgtacctcagtggcggcgtcggtatcacgcccgtcatgtccatggcgcgctggttctacgacaccaacgccaacgtcgacatgacgtttatccacagcgcccgctcgcccaaagacatcatctatcaccgcgaactggagcacatggcctcgcggatcgataacttcagcctgcacctgatctgcgaaaaacacggcttgggcgagccttgggcgggttatcgcggttacctgaaccacaaaatgctcgagctgatggtgccggacttcctggagcgcgaggtgttctgctgcgggcctacgccctacatgaacgcggtgaagcgcctgctggaagccgccgggttcgacatggcgcgttatcacgaggaatccttcggcgccacgccaccggaagcgcgtgccgacgccgtggaacaagccgaacaagccgccgaagcgccggaaatcgacctggcggatctgcaccaggtggaattcattgcctcgggcaaaagcatccgcgtggcaccgggcgaaaccgtgcacgcagcggcggccaagctcggcctgctgatcccgaaagcctgcggcatgggcatttgcgggacgtgcaaggtgatgaagctgggcggagaggtcgagatggaccacaacggcgggattaccgaggaagacgaagccgagggttacatcctgtcgtgctgcagcgtgcccaagggggatgtgcgcatcgagttctgaagaccgcgctgaccgcatcgcaggcaagccagctcccacccttgaatgtatttacgcatcaaactgtgggagcgggcttgcgcgcgataggctgcgcagcagcctgaacgtcaggcgcccatcacttcccggatgtctgccgccaattccctcacacgctcttcctcggtatcccacgcacacatgaaccgcgcgccgcctttgccgatgaaggtgtaaaaccgccagcccttggccgtcagtgcctcgatggccgcttccgagagttgcaggaacacgccgttggcctgtaccgggaacatcaattccacaccgggaatgtccgccaccaggctgctcagcaactgcgcgcaactgttggcgtggcgtgcgtgcttgagccaggcgtcgttttccagcaagcccacccaaggggctgagaggaagcgcattttcgaggccagttggcccgcctgtttgcagcggtaatcgaagtcttcggccagcttgtggttgaagaacaagattgcctcacccaccgccatgccgtttttggtgccgccaaaacacagcacgtctacacccgctttccaggtcaggtcggcgggcgagcagccgagaaacgcacaggcgttggagaaacgcgcgccgtccatgtgcaggttcaagcccaattccttgcaggtcacgctgatggcgcggatttcatccggggtgtacacgctgccgacttccgtggcctgggtcagggtgaccacgcgcggtttcgggtagtgaatatcctggcgcttgagcgcgatttcgcggatcgactccggggtcagcttgccgttttcggtgcgcgcggtgagcagcttggaaccgttggagaaaaactccggcgcgccgcattcgtcggtttcaacgtgggcggtttccgagcaaatcacgctatggtagctctggcacaaggacgacagcgccagcgagttggcggcggtgccattgaaggcgaagaacacttcgcagtcggtttcgaacaggttgcggaaaccgtcggcggcgcggtgggtccattcatcatcgccataggcccgctgatggccctggttggcttgttccatggcggcccaggcttccgggcagatgccggaatagttgtcgctggcaaattgttggctcttgtcggtcatggcccattcctgtggtcgatgttggtgcgcactgtaaccaagatcgttgggggtgcgcacgcactgtaaatgcaaagtcactggggaattatgcacggtactgaaacgatgcctgtgggacgtgtccgcgatggcgctttggatttgctcaagtggctggcgctgttgtgcatggtgctcgaccacttgcgctatgtcgggttgagcctggacggcctgtatgtgccggggcgcctggcgttcccgtggttttgcctggcgattgcggcgaatgtgcaccgcgcgcgaaatgcgcccgtgaccggccagtggcgttatctgggatggctgttgctgttcagcgtgatcagtgaagtgccgtaccggatgtttatcgacgatgccgatacgttgaacgtgctgccgaccctggcgctggggttgctggttgcccgaggatggcagcagaaggcggtttttgatcgcggattggcgctgatcgctctcgcaatcgccgccgtgttttcctcgcacctgatgttcgggtttttcggtgtgttgttgccgctggcgatgctgctggtgtttcgccggccgtggtatttcagcgtgttgccgggggtggtttgcgttgcagctaatcaatggcagattctgctcaatagcggcacgcccgtcgcgttaatggggttggccgcatgcctgatcgcgccgttgggcggattggtcttgttgcgacatgccaaaaacgcctcgccaccggccatgcgtcgctgggcttacacactttatcccctgcatttcctgctgctgctactcgtccgccaattcatcgcctaacccttgtgggagctggcttgcctgcgatgcaggcacctcggtgtgtcagttgcaccgaggcgatgccatcgcaggcaagccagctcccacaagggcctgcgcacaatatttcggcaatgtcgtaaacgcacctttgcgtggcgtgcgtaggcatttgacctgcaagcaccagccctaccatcgcatcaaagggccctgcgagggcctcaacaatacgaaaggctgggagagacgcgatgttcagcaaaaaagaccagatccagggatatgacgacgcattgctggcggccatgaatgccgaagagcagcgtcaggaagatcatatcgagctgatcgcgtcggagaactacaccagcaaacgtgtgatggaagcgcaaggcagcggcctcaccaacaaatacgccgaaggttacccgggcaagcgctactacggcggctgcgagcacgtggacaaggttgaagccctggccatcgagcgcgccaagcagctgttcggcgccgattacgccaacgtgcagccgcactccggctcgtccgccaacagcgccgtgtacctggccctgatcaacgccggcgacaccatcctgggcatgagcctggcccacggcggccacctgactcacggcgccaaggtgtcgtcctcgggcaagctgtacaacgcggtgcaatacggcatcaacaccgacaccggcctgatcgactacgacgaagtcgagcgcctggccgttgagtgccagccgaaaatgatcgtggccggtttctctgcctactccaagaccctggatttcccgcgctttcgccagatcgccgacaaggtgggcgcactgctgttcgtcgacatggcccacgtcgccggcctggttgccgctggcctgtacccgaacccgctgccgtatgccgacgtggtcaccaccaccacccacaagaccctgcgcggtccacggggcggcttgatcctggccaaggccaacgaagccattgaaaagaaactcaatgcggccgtgttccccggcgcccagggcggcccgctgatgcacgtcatcgccggcaaggccgtgtgcttcaaggaagcgctggagccaggtttcaaagcctatcaacagcaagtcatcgacaacgcccaggccatggctgacgtgtttatcaagcgcggctacgacgtggtgtccggcggcaccgataaccacctgttcctggtcagcctgatccgtcagggcctcaccggtaaggacgcagacgccgccctcggccgtgcccatatcaccgtgaacaagaacgccgtgccgaatgacccgcagtcgccgttcgtgacctcgggcctgcgcatcggcaccccggcggtgaccacgcgtggtttcaaagtgccgcagtgcatcgaactggccggctggatctgcgacatcctcgacaacctcgacaacctcggcgacgccgatgtcgaggccaacgtggccaagcacgtgtctgccctgtgcgctgatttcccggtttatcgctgagcgcggttttggagtaatgactatgcaacgctactcgggcttcggcctcttcaagcactcactcagccaccacgaaaactggcagaaaatgtggcgcacgcccacgcctaaaaaggtctacgacgtggtcatcgtcggcggcggcgggcatggtctggcgaccgcctactacctggccaaggaacacggcatcaccaacgtggccgtggtcgagaagggctggctgggcggcggtaacaccgcgcgcaacaccaccatcgtgcggtccaactacctgtgggacgagtcggcgcacctgtacgaacacgcaatgaaactgtgggaaggcctgtcccaggacctgaactacaacgtgatgttctcccagcgtggcgtgtacaacctgtgccacaccctgcaagacatccgcgattccgagcgccgtgtgagtgccaaccgcctcaacggcgtggacggcgaactgctcaacgccaaacaagtggccgacgagatcccgtacctcgactgctcgaaaaacacccgctacccggtactcggcgccactgtgcaacgtcgcggcggcgtggcccgtcacgatgccgtggcctggggctttgcccgtgcggctgacgcactcggcgtggacctgatccagcagaccgaagtgatcggcttccgcaaggaaaacggcgtgtgcatcggcgtggaaaccaacaagggctttatcggcgccaagcgcgtcggtgtggtcacggccggtaactccgggcacatggcgtcgctggcgggctttcgcctgccgatcgaatcccacccgctgcaagcgctggtgtcggagccgatcaagccaattatcgacagcgtgatcatgtccaacgccgtacacggttacatcagccagtccgacaagggcgacctggtgatcggcgccggtatcgacggctacaacggctacggccagcgtggttcgtacccggtgatcgaacacaccatccaggccatcgtcgagatgttcccggtgctgtcccgcgtgcgcatgaaccgccagtggggcggcatcgtcgacaccacgccggatgcgtgcccgatcatctccaagaccccggtgccgaacatgttcttcaactgcggttggggcaccggtggcttcaaggccacgccgggctcaggcaacgtgtttgccgcgagcctcgccaagggtgaaatgcacccgttggcggcaccattttccatcgaccgtttccacaacggtgcgttgatcgatgaacacggcgctgcggccgtcgcccactaacaggagaaattccctatgttgcatatcttctgtcctcactgtggcgaactgcgctccgaagaggaatttcacgcgtccggccaagcgcacatcccgcgcccgctggacccgaatgcctgcactgatgaagagtggggcgactatatgtttttccgtgataacccccgtggcctgcaccacgagctgtggattcacgctgccggttgccgccagtacttcaacgcgacgcgcgacacgctgacctacgaaattcttgaaacctacaagatcggcgagaagccgcaattcaccgccaaggcctctggagagaaggtatgagccagatcaatcgcctgtccaatggtggccggatcgaccggaataaagtcctcacgtttactttcaacggccagagctacaaaggctttgaaggcgacaccctggccgcagccttgctggccaacggcgtcgacatcatcggccgcagcttcaagtattcgcgccctcgcggcatctttgccgccggcgccgaggaaccgaacgcggtgttgcagatcggcgccaccgaagccacccaaatccccaacgtgcgcgccacgcaacaggcgttgtaccagggcctggtcgccaccagcaccaacggctggccgaacgtcaacaacgacgtgatgggcattctcggcaaggtcggcggcaagctgatgccgccgggtttctactacaaaaccttcatgtacccgcaatcgttctggatgacctacgagaagtacatccgcaaggccgcaggcctgggtcgctcgccgaccgagaacgacccggacacttacgacaacttcaaccgtcattgcgacgtgctgatcgttggcgcaggccctgccggcttgtcggcggcgctggcggctgcgcgcagcggcgctcgggtgatcatcgctgacgagcaggaagagttcggcggttcgctgctggattcgcgcgaaagcctcgacggcaagccagccaccgagtgggttgccagcgtaatcgctgaattgaaagctttgcacgacgtggtgctgctgccccgcgccacggtcaacggctaccacgaccataacttcctgaccatccacgaacgcctcaccgaccacctcggtgatcgtgcgccgattggcgtggtgcgtcagcgtatccaccgtgtgcgcgccaaacgcgtggtactggcgaccggtgcgtgcgagcgcccgctggtgtacggcaacaacgacgtgccgggcaacatgctcgccggtgccgtttcgacttacgtgcgccgctacggcgtggcgccgggcaagaagctggtgctgtcgaccaacaacgaccacgcctaccgcgttgcgctggactggttcgacgcgggcctgcaagtggtggccgtggctgatgtgcgccacaacccacgcggcgccctggtggaagaagcgcgcgccaaaggcattcgtatcctcaccggcagcgccgtgatcgaggcccgtggcagcaagcacgtcaccgccgcccgcgtggccgcgattgatgtgaaagcacacaaagtcaccagcccaggcgagtggctggagtgcgacctggtggccagctccggcggttacagcccggtggttcacttggcttcgcacctgggtggcaagccgacctggcgtgaagacatccttggttttgtaccgggcgaagccccgcaaaaacgcgtgtgcgtgggtggcatcaacggcgtctatggcctcggcgattccctggccgacggttttgaaggcggcgtgcgcgcggccagtgaagccggttttgcgccagtcgaaggcaccctgccaaaagccttgagccgcttggaagagccgacactggcgatctaccaagtgccgcacgacaagccaaccgcacgggcgccgaagcaattcgtcgacctgcaaaacgacgtgaccgccgcagccatcgaactggcgacccgcgaaggtttcgagtcggtcgagcacgtcaaacgctacaccgcgctgggcttcggcaccgaccagggcaagctgggtaacgtcaacggcctggccatcgcggctcgctccctgaacgtgaccatcccgcagatgggcaccaccatgttccgcccgaactacacgccggtcacgttcggcgccgtagccggtcgtcactgtgggcacatcttcgaaccggtgcgctacaccgccctgcaagcctggcacgtgaaaaacggcgccgagtttgaagacgtcggccagtggaaacgcccgtggtatttcccgcgcaacggtgaagacctgcacgccgccgtgaaacgcgaatgcctggccgtgcgcgacagcgtcggcctgctggatgcctcgaccctcggcaagatcgacatccagggcccggatgcgcgtgagttcctcaaccgcatctactccaacgcctggaccaagctcgacgtgggcaaggcgcgctacggcctgatgtgcaaggaagacggcatggttttcgatgacggcgtgaccgcctgcctcgccgacaaccacttcctgatgactaccaccaccggcggcgccgcccgcgtgctccagtggttggaaatctaccaacagaccgaatggccagacctcaaggtgtacttcacctcggtcaccgaccactgggcgaccatgaccctgtccggccccaacagccgcaagctgctggcggaagtcaccgacatcgacctggacaaggacggcttcccgttcatgacctggaaagaaggcttggtggggggcgtaccggcgcgggtgttccggatctcgtttaccggtgagctgtcgtacgaagtcaacgtgcaggccgactacgccatgggcgtgctggaacagatcgtcgaggccggcaaaaagtacaacctgaccccgtacggcaccgagaccatgcacgtgctgcgcgccgagaagggcttcatcatcgtcggccaggacactgacggctcgatgaccccggacgacttgaacatgggctggtgcgttggccgcaccaaaccgttctcgtggatcggctggcgtggcatgaaccgtgaagactgtgtgcgtgaagagcgcaagcagttggtgggcttgaagccgattgatccaaatgtatggctgccggaaggcgcgcagttggtgctcgatccgaagcaggcgatcccgatgaagatggtcggccatgtcacctcaagctatgcccacaactcactcggctattcgttcgcgatggcggtggtgaagggcggcttgaagcgcatgggcgagcgggtgttctcaccacaagcggatggcagcgtgatcgaggcggagattgtgtcttcggtgttctttgacccgaaaggtgatcgccagaacatctgacaaaccgcattgcaggcaagccagctcccacagttggaatgcgttcccctgtgggagccgggcttgcccgcgatgaggcccgaacagtcaccacagaattcagaacaggtgctttatgacagcagccaacgtttaccaacaacgccccaccaccggcgccaaggccgagtcgtcgctgcaccatgccgacctcgccagcctggtcggcaagggccgcaaaaacgccggcgtgaccgtgcgcgaaaagaaacttctcggccacctcaccatccgtggtgatggccatgacgcagccttcgctgcgggcgtgcacaaggccctcggcatcgaactgccaagcgccctgcaagtgatcatcaaaggtgaaaccagcctgcaatggctcggccccgatgagtggttgctgatcgtgccaagcggtgaagaattcgccgccgagcaaaacctgcgtgccgccctgggtgatttgcatatccagatcgtcaacgtcagcggcggccagcagatcctcgaactcagcggcccgaacgtgcgcgatgtgctgatgaagtccaccagctacgacgtgcaccccaacaacttcccggtgggcaaggcggtgggcacggtgttcgccaagtcgcaactggtgatccgccacacggccgaagacacctgggaactgctgattcgccgcagcttctcggattactggtggctgtggctgcaggatgcgtctgccgaattcggcctgagtgttcaagcctgaggagctagccatgagccgcgcacccgatacatggattttgactgccgactgccccagcgtgctcggcacggtggacgcggtcacccgctacctgttcgagcagggctgctacgtgacggagcaccactcgttcgatgaccggctctcgggccggttcttcattcgcgtggaattccgccagcctgacggttttgacgaacaggcgttccgcgatggcttggccacacgaggcgaagccttcggcatgatcttcgagctgacggcgccgaactaccggccaaaagtggtgatcatggtctccaaggccgatcactgcctcaacgacctgttgtatcgccagcgtatcggccaactgtcgatggacgtggtcgcggtggtctccaaccaccccgatttgaaacccttggccgactggcaccagattccctactaccatttccccctcgaccccaacgacaaaccgtcccaggagcgccaggtgtggcaagtggtggaagacaccggcgccgagctggtgatccttgcgcgctacatgcaagtgctgtcgccggagctgtgccgcaagctcgatggcaaggccatcaacattcaccactcgttgctgccgggcttcaagggcgccaagccgtatcaccaggcctacaacaagggcgtgaagctggtgggcgccacggcgcattacatcaacaacgacctggacgaaggcccgatcatcgcccagggcgtggaggtggtggaccacagccactatcccgaggatttgattgccaaggggcgcgatatcgaaggcctgacgttggcccgggcggtggggtatcacattgagcggcgggtgtttttgaacgctaatcgcacggtcgttctttagattgctatcgcgggcaagcccgctcccacattttggccgtgtgaacccaatcaaatgtgggagctggcttgcctgcgatgaggccatcagcaacaacacaagaaacagcatctgtaacccgagcacttaaacgcgctgcctgcctgggcaacgcggttccataaaaacaacagcgaggtgaaagcatgtctggtaatcgtggtgtcgtgtatctcggcaacggcaaggtcgaagtacagaaaatcgactatcccaaaatgcaggacccccgtggcaggaagattgagcacggcgtcatcctgcgcgtggtttccaccaacatctgcggctccgaccaacacatggtgcgtggccgtaccactgcccagaccggcctggtactcggtcacgaaatcactggcgaagtgatcgagaaaggcagcgacgtcgagaacctgaaaatcggcgacctggtgtctgtgccgttcaacgtggcctgcggccgttgccgctcgtgcaaagagcaacacaccggcgtgtgcctgaccgtcaacccggcccgtgccggtggcgcctacggctacgtcgacatgggtgactggaccggcggccaggccgaatacgtgctggtgccgtacgccgacttcaatctgctcaaactgccggaccgcgacaaggccatggagaaaatccgcgacctgacttgcctctccgacatcctgcccaccggctaccacggcgcggtgaccgcgggcgtcggccccggcagcagcgtctacatcgccggcgccggccctgtcggtctggctgctgccgcctccgcacgcctgctgggcgcggcggtggtgatcatcggcgacgtcaacccggtgcgcctggcccacgccaaggcccagggttttgaaatcgctgacctgtccaaggacaccccgctgcacgaacagatcgccgcactgctgggtgagccggaagtcgactgcgccgtcgacgccgtgggcttcgaagcccgtggccatggccatgaaggcgttaaagccgaagctccggccaccgtactcaactcgctgatgggcgtggtccgtgtggcaggcaagatcggtattccgggcctttacgtcaccgaagacccgggcgctgtggacgccgccgcaaaaatgggcagcctgagcattcgctttgggctgggctgggctaaatctcacagcttccacaccgggcaaacgccggtaatgaagtacaaccgccagctgatgcaggcgatcatgtgggaccgtatcaacattgctgaaatcgtgggtgtgcaggtgatcagcctggatgatgcgccgcgcgggtatggcgagttcgatgcgggtgtgccgaagaagtttgtgattgatccgcacaaaatgttcagtgcagcctgacgcgttgggctgaaaaaatggcgaccctggaggtcgccattttttatgggttatttaagtgccgtcagccgcagatagggatcggccacctcaccattttttatcaagcgcttaccgccgtaatcacagtgaattttgccagcgtgctcggtgacttcctcggccttgaggttgtactcgggggccaggtaatcgtcgcgggttgccgccgtttgcccggtccatgttttgccgttggcggtggcggtgtattgatagccctcaccgtacggcgggggcaggtcggggtctgtgtagggttttgattgaatgtcgcgaggggcagggcattggtcaatatcaacgggtgcgcgtgtctgctggccgttgattgcgctgaatacagcaataacgttggggatcaatccgatcatggtggttacagctcctgagtagggttgcctgatagaggccaccttgggtgggctgtaacgacgcttgggttccgaggagtcgggtgcttcaggcatgggaaagggcgacatggcgccgcccagccgatgaagatcaaatgtggtgagcggcggtgttgtcagcgattagccaacgcaccctgatacacagtcggccccgtcggctggcggctcaccgaaccgcccttggtttccgagctcaccattaactctaccggcttgctgatggattcctgttggcgcgggttgagcccgataatgcctttgccgtcttccggcagcaggccaagggatacgggggtaccgtctttggggactgcccacagttcgaggctctggtctggtgctgcagccgtcgtggcgatcggctgcacttcaagataatccttgtgggccatgatttgcgcggccggctgctgttcagtggtcaccagcgtggcggcggattttacggtgtcttgcgtatacagcgcaccgccgacaccggcggctaccaccaggcaagcgccgatgaacaggcgagggccgctccagaatgaaggtttttgatcaatcacttggggttggatcgcagtcataagtctcttcctgacaaattttgtagtcagttcattgaccctgccacggtcgatgggttcctgaacccatcgccgtcgatcgtcgttaaagtgatgccaattggccttgatacagcacggggccggtgggttggccggtgggtgaacccccttgaggctccaggctgatggccagggtcaggggggcggtcagcagcgcctgctgcgctttgctcaactgaattcgacctttgcccccatcaggcaccaagcccagggaaatcggttttcctccggccgcaatcgcccacaactccaggacacgcgtcggctccagcgccgccagcgtcagtggttcgacttgcaggtaatcggcaaacgcctggatgcgcagtgccggttgctggctggcgttgaccaggatggcgttgtactgcgcggtgtggtcacgctggtaaagcacaccgacaaacagtgccagcaccacggcgcatgccgccgcaagcaaacggagattcatccagaacggtttcttcgcgggcacatgcagcacctgcggctcaatccgcgctttgatgcctgcccagatgtggtcgggcaccgggcgttcgggcaaggtgccggtcaggctggccagggccgcctgccaatggccgagttcgatgcgcagtgctgcgtcgtccagcaacaggttttcaaagcgcctgcgcgcggtggcgggcattagcccgatggcatagtcggcggcgagggcgcggcgcagggcggtggtttgatagttcatgattcaaggcacctgcgcaggcgctccatgccgcggcggatccaggatttgaccgagcccaggggcaccgccaagtggtcggccaactccgagcacgacaggccctgaaagtaggccacggtgatcgactggcgttgcatgccgtcgagagtgtccaggcaacggttgagggcgcgggcttcgcgctcactgtcgagttgctcgtgggcgctggggctgtcgtcgagcagcgcgtcctgctggccgtcggccaggggctgctcgcggcgcttgcgcaattggtcgatggccaggttgcgggtgatgttgaccatccacgtcatcggcgccgccaggtgggcttcgtagcgcgaggcgttgtaccagatacgcacgaaggcctcctgcagcacctcttcggccaggtccgaacggcccatgaaacggaaggcaaccccgtgcaggcgcggcgacacgctgcggtacagggtttcgaacgcctggcggttgcccagggcgcattgggccagcaggggccgcaatgggtcggtgtcgttgatggaaatagggcttctccaggctctcgttcgagggcgacgggactgcgcacggtaggcagagggtagttcagctcgagcattcattccatccgactccgggcggtgcatgccagatatacgcgaggggcagacatttggatgcagctttttctgaactaatcttgaagtgggaacattccttcggcactgtcagtcaaacgcctgcttttagctcctacattcagaggttgtcttgatgaagatttcacgcggtttcgccctgtcctgcctgttgaccgtggccgccagcccggtgtttgccgcaggtttcagcctgggcgacgtggccaacgccgtttctggcgcccagggcagcaacaacaaggcggctgctgcagcgccaagctcccagactgccggcctgctgagcgcattgacctcgcaactgaacgtcaccccggagcaagccgtcggcggcaccggggccatgttgggtctggcgaagaaccaactgagcagcacggattattcgcaactgggcaaaagcgtgcctggcctggatcaactgtcggggagcaactccctgggcagcctcggcgccttgagcggtttgctcggccagactggcggcagcaagaccagtgggctggacagcgtgttgggtaacgtgaaaaacaccaacgacctgaacactgcgttcagcgcactgggcatggacagcggcatggtcggccagtttgcgccggtgatcctgcaatacctgggcggccagggtgccaatcagtcggtgctgggcaagctggcttcggcctggggtactggcggctaacgcccctctgcgcgcaactgttcgatgcgcgcatccttctccatccagagctggttgacccagttctggacggtctggcgaaacgctggatcgttctcgtaatcgccctgccacaacgccgggtccagctcacgggtgcggatatcgatgatcacttttggcaccgcgccgctgatcaagtcccagaaccccggaatcttttgctgcggatagaccacggtcacgtcgaggatcgcgtccagttgttcgcccatcgccgccagcacaaacgccacaccgcccgccttgggcttgagcagccgcgcaaagggtgaagcctgctgcaagcgtttggcctcgttgaaccgcgtgccttccaggtaattgaccaccgtcactggctggcgcttgaacagctcgcaggcctctttggtgatcttcaaatcctgccctgccagctccgggtgtttggccaggaaggccttggtgtagcgtttcatgaacgggtaatccagcgcccaccaggccaggccgaggaagggcacccagatcagctcttttttcaggaagaatttgaagaatggcgtacgccggttgagggtttggattagtgccggaatgtccacccaggactggtggttgctgatcaccaggtaggaggtgtcgccgcgcaggtcatcgccgccgcgaatgtcccattgggtcgggatgcacagcgaaaagatcagcttgtcgatttcggcccaggtctcggcgatccacatcaccgcccacgaggcatagtcgcgaaagcggccgggggcaatcagcttgagcagggcaaacaccatcaatggcccgaacagcaccagggtgttgagtaacagcagcagtgtgaccaaacagccggtgagcaggcggcgcataagcaactcttggaattgtgtgaggcgggccatgataagagaggtgagtctagaggccaaatcgcaaattgcccgacgaatgtttcacaatgtggcatgtagggttgagaactaactaaccacggcttttgcggtctagaatccgcctacttctttccggggaaatcacttcgtgaaactgctatttgcctcgctcgccctgtttgccctgccggccatggccgccgaaccgaccctttatggtcgctacgaatatatccagttgcccgagatcggccagaccttcaaggccaagatggacaccggggcgctgaccgcctcgctgtcggcccgtgatatcgaaaccttcaagcgtgatggcgacgactgggtgcgtttccgcattggcggcaaggacgcgagcgacaaggtgttcgagcacaaggtttcgcgcatcagcaaaatcaagagccgcgccgacgaagatgacgacaaggacgaagccaccgtggccaagcgcccggtgattgatctggaaatgtgcctgggcgacgtcaagcgcaccgtggaggtcaacctcaccgaccgcagcagcttcaattacccgctgctgatcggcgccaaggccctgcgtgaattcggcgcggcggtgaacccggcccgtcgttacacggctgataaaccggactgctgacagacgcccatgccacatatcctgattgtcgaagacgaagccgcgattgccgacacgctgatctttgccctgcaaggcgaaggcttcaccaccacgtggctgagcctcggccaggaggcgttggcccatcagcgccagaccccggccgacctgatcatcctcgacatcggcttgccggacatcagcggctttgaaacctgcaagcagttacggcgcttcaccgaagtgccggtgatgttcctcagtgcccgcgatggcgagatcgaccgggtggtggggctggagatcggcgccgacgattatgtggtcaagccgttcagcccgcgggaagtggcggcgcgggtccgggcgattctcaaacgagtgggcccgggcattgcccccgccgtgtttcaggttgacctggagcgcatgcagatcagttatcgcggccagcctctgagcttgacgcgccatgagttccgcctgctgcaaagcctgctggagcaacccgagcgcgtgtttagccgcgagcaattgctggatgccgtcggcgtgcccgccgatgccggctacgagcgcaacatcgatacccatatcaaaagcctgcgtagcaaactgcgaaatgtagcggcggatgccgagccgatccagacccatcgcggcctgggctatagctacagcccgagcaacagctgatgcgcctggggctgcggattttcctggtgtacgcgctgtttatcggcctgaccgggtatttcgtgctcaacacggtgatgaaggaaatccgccccggcgtgcgccagtccaccgaagaaaccctggtggacacggccaacctgttggccgagatcctgcgcgaggacgtgaaaaacggcaccctcggccagagccactggccggaatacctcaaggcttacggcactcgccagcccggcgcgaccatctggggcctgccgaaaaaccaggtcaaccaccgcatctacgtgaccgatgccaacggcatcgtgttgctcgactccaccggcgaagcggttggccaggattactcccaatggaacgacgtgtacctgaccctgcgcggtgagtacggcgcgcgctccacgcgtagcgaactggatgacccggccacgtcggtgatgcacgtgggcgcgccgatccgcgataacgggcagattatcggcgtggtcaccgtggccaagcccaacagctcgttgcagccctatgtcgaccgcaccgagaaccggctgctgtggtacggcgctgggctggtggtgctaggcctgttgctgggtgcgttgttgtcgtggtggctgagcgtggcattaaggcgcctgaccgcctatgccgaggcggtcagcgaagggcggcgtgccgagttgccgcattaccggggcggtgagctcaagcagttgtccaccgccgtggagcatatgcgcacacagctggagggcaaggcctacgtcgagcattacgtgcacaccctgacccatgaactgaaaagcccgttggcggcgattcgcggcgcggcggaactgttgcagggcgatatgacccgtgagcagcaacagcgcttcgtgggcaatatcgacagtgaaagcgcgcgcttgcagcaactgatcgaacgcctgctgaacctggcacaagtagagcaacgtcaaggcctggaggaacagacgagcattgcgttggcgggaatggtcgaggatgtgctcaaggcgcagtgcgcgcgcattgaaggtgccgggttgcaggtcgagcaggcgattggcgcgcaggtgagggtgtacggcgaaccgtttctgttgcgtcaggctttgggcaatctgctggataacgcgctggatttcacgccacctggcggcacattgaggttcagcgcccacacccaacaccatgaagtgcagatcacgctgttcaacggggccgcaccgattcccgattacgcgctgccgcgcttgagcgagcggttctactcgctgccacgcccggccagcgggcgcaaaagcaccgggctgggcctcaattttgtcgaggaagtgatgaaactccacggcggcaccctgcagatcggcaacgtgccgggcggggtacaagtggtgctgcaactccacacagtctccacatcccccacataaaccgcccatacgggctgcccagactctccccatcaaaacagggagagacccatgaaccgcagcctgctattcaaactcggcgcgattgcgctgctgatcctgctgttgctgattccgttgctgatgatcaacggcatcatcgttgagcgccaatacacccgcgattccgtgttggccgacatcgcccgcagctccagctacagccagcgccttaccggcccggtgatggtggtgccgtaccgcaagatcgtccgcgagtggaaactcaatgaaaagctcaaccaacgctacgaggaaacccgtgaagtgcgcggtcgtctgtatttcctgccggagcgttttgagctcgacggtcaggtgcaaaccgaactgcgtgctcgaggcatctaccaggcgcggctgttccacgccgacaaccgcatcagcgggcgttttgttttgcctgagcagttgggtatcaaagaaaacttcgccgattacacttttgagccggcgtatctggcggtgggtatcagcgatattcgcggcattgaaaatgcgctgatgctggaactgggcagccagcgcctggagttttcacccggaactcaagtggcctggctgggggagggcgtgcacgtagcgttgcccgagcaggacagtaaaaagccggccgccctggacttcgccttcgacctgcgcctgcaaggcaccgagcaactgcaagtggtgccggtgggcaagaccagccaagtgtcgctggcttcgaactggccgcacccaagcttcatcggcaacttcctgccgacacaacgggacgtgaccgataaggggtttaccgccaactggcagaccaccttcttctccacgaacctcgaagaaagcatgcgcggctgtccgctcgatcaagtctgtgaggatttcaacagccgcagcttcggcgtgaacttcatcgacccggtggaccagtacctcaagagcgaccgcgcgatcaaatacgcactgctgtttatcgccctgacctttgccggtttcttcctgttcgaagtgctcaagggcctggcggtacacccgatccaatacgcgttggtggggtttgccctggcgtttttctacttgctgttgctgtcgttgtccgagcacatcgggttcgccctggcttacctcatctcggcgagtgcctgtgtgttgttgatcggcttttatgtctgccacgtgctgcgcagcgtccgccacggcctggggttctcggcagggttggcggccttgtatggcttgttgtacggactgttgagcgccgaggattacgcgctgctgatgggctcgctgttgctgtttggcctgctgggtacggtgatggtgctgacgcgcaaactggactggtacggcgtgggcaagcgcaaggggtttgatatggaggcggtgcaatgatcgggttgcgtgaggatcagcaaatgagggcgcggatggtcgactatctcaactttgccaccgccctctgtgggagcgggcttgcccgcgatagcagaggaccagtacccggtgcgttgaatggcgcaccgctatcgcgggcaagcccgctcccacattggaaggcggtggatgttaaagcgggggttgagtctgctgcatcgaaggccgccggctgacctcggcataccaggctgcaagctgggggttggcgtcacgccattgcaggtccggatgacggaaatccagataacccaaggcacaggccacgctgatcgctgcgatgtcgaaatggctggtcagctcggcaatggcgtcctgttccaactcggcgacgctgcgacggatcttgttgcgttgctcgtccagccactggtcccagtgcttttctgcagggcgcatcgcggtctcgtagcgcaccagcacggcggcatccatgatgccgtcggccagcgaggccagggtcaggcggcgccagcgcgccgagccgtcgcggggaatcagcgggttgccgacgtgctgatggtcgaggtagtcgaggatcacccggctgtcgtgcaacacgctgccgtcggccaggcgcagggccgggatcttgcccacggggttgccttgcaccacttgggcatccgggttgaccggtgttggcgtacagccttgcagggccacgcggtcctgttggccggtttcagccagcaagacgcggactttgcgcacgaagggcgatgcagggttgtgaaacaaggtcatgctgggagcggacatgggcaaacctcaagaatgggctgcggctagcctagagatattgaaggtgtttttgaaggctcccacattttgatttgtgaacaccgttaaatgtgggagctggcttgcctgcgatagcgccttcagccgcgccgcttaaacaacccccaaacaccaatggctgccggaatccccaaccccacccaactgagcgagtcccacagcccatcccccagcaacgccgcaaacagtccggcggcgctgagcaggccaatccccagtggaatgccgaacaccttccagaaactcgactggcgcggcttcatggcttggcggccttgcgccgcacgacccacaggtaaaccccgctgccgagcacgatgatggtcagcacatccagcaccgcccacaggaccttcatcggcatgccgccgtagtcgccaaagtgcagcggctgcgacatgcccatggcgtccatgtaccacggcctttcggcgatggcggtgacggccagggtgctggcgtcgatcagcaccggtgtgagcaaatgcgaggtcaggtgcgtgcttcctttcatgaacaccgcgtaatggtgctcgctggaaaagcgtgtaccggggaaggcgatgaagtccggctccatgcccggcgcggccttggccgcgatggtcagcaagtcggtggccggtgcgcgctgagtcagcggcggcgcgtttttgtagggctcgatcatggcgctgaggctgtcctggcgccaggcggcgatgatcaggtcggcgcaggcgctgatcacgccggtcacgcccaccaccagcgcccaggtcagggtgaccacgccgatcaggttatgcaggtcgagccagcgcaggcgcggggatttgtcctggcgcacggtggcgaacttcagccggcgcatgaacggcaggtacagcaccgtgccggagaccatcgccaccacgaacaaaatgcccatgaatgccaacagcaatttgcccgtcaggccgacgaacatgtccgtatgcaagcgcagcaggaacagcgtcagcccgccattggccgccggggtttccacggcttggccagtacgcgcgtcaagcatgaaggtgtgggacgaattgggctcggtgccggccgtggcggccatgatcgcgatcacaccgttcttgtcgtcttcgtcccaggccaggtattgcatggcctcgccggggcgatgagcctgcgccttggctaccagttgctcaagattgagctgcggcgtatcggcaggcatctgcgccagttccggctcgttgcccagcaagtggtcgatctcgtggtgaaacaccagcggcaggccggtgagggcgagcagcagcaggaacaccgtgcagatcaggctggtccaggtgtggatgaaggaccagcggcggatggttttgcttttcattttttcaaccttcagacacaccaaagccgcccattggggcggcctggcggttaactcaaccgattaccactgataggtggcactggcgatgacactgcgctggtcgccaaagtagcagtagttggcgtcacaggtggaaaggtaatccttgttgaacaggttggtggcgttgagtttcaccgacgcacctttgaggctgttgtccaggcggccgaggtcgtaatgcaccgcgccgtcgaacactgtgtaggcattggccttgcccaaccaggtattggcctgatcgccataggtgttgccggtgtagcgcgcgccgaagccgatgccgaaaccgtcaagcatgccggtgtgccaggtgtagtcggtccacagcgaggcttgctgctcaggcatcagttgcagacggttgcctttgtattggcctttttgaacctcggacttggccagggtgtaggccgcgatgaccttgaggttctcggtcacgtcagacacggcttccagttccaggcccttgaccttcacttcgccggtctggtcggtaaccgacacgccaccggactggaagctggtgacttgcacgtttttctgtgtcaggtcgtagaccgcagcactcaacagtgtgttggagcccggcggctggtacttgatgcccagttcccactgtttgccttcggtgggcttgaacgacttgagagggtccacatcggcgttgctcgccggctggaacgactcggcgtaagacaggtacggcacaaagcccgaatcgaacacatagctgatcgccgcgttgccgctgaagttcttgctgcggtcagtgttggtcgcgtcgtttttgttgaagtaggtggtgccttggtgaacccagtcttcacgaccgcccaaggtcaggcgccacttgtccagcgccatttggtcctgagcatagaggccggtctgcacggttttctggttgtaatcgtaaaacgctgtggagcgtgccgggcgcacgaccggctgagtgttgaccgggttgaagatgttgatcgttccggcgccaccgaagatcgacaggtaggaggtgtcggtacgctgatggtcgaggccgagcaacagcgtgtgggtgacgtcaccggtggcgaagtccgcctggaaattgttatcgaccgcgaactggccaatgctttcgtccacattggtcgatgagcggctaatattgccggccgcatccgccggggagaacgcataagaacctacggtcagttgctggaaggccaactccgatttggtgtagcgcaggttctgtttgaactgccaggtgtcgttgaagcggtgttcgaacgcgtaacccaatgcgtagtaggtgcggtcgtagaactcgtagtccgggtcacccaggtttttgtggtgggagacgtcgcccagcggtgatttcagtttggtgccctggattggcatgaactggctggtggtgccggtatcgtcgcgggtgaactgcgacaggaaagtcagcttggtgtcggtgtcgatgttccaggtcaggctcggcgcaatgttgtagcgcttgttgtcgatgtgatcgacctgggtgccggcatcgcgtaccacgccgctgaggccatagaggaactggccctcatcatcaatcttgccagtgctggcaaaactgatctggcggtagttgtcgctgccgtattgcacttgcacggcattgctcgattcagcgctggggcgacggctgaccatgtccagcaagccgccgggcggggtttgcccgtagatcgacgacgccgggccacgcagtaaggcgagacggtcgaggttccaggtctcgactttagggttggcgtacacgccgcgtgccagtggcaaaccatcgaggaattgcgtgggctcaaagccgcgcacgcgcatccagtcgtagcgggtgtcgctgccgtagctggcagacacgatgccgggcatgtatttgaccgcgtcatccaggttctggacgttgcggtcctgcatctgctggcgggtggcgacggagattgagcgcggcgcttcgaccagcgcagtgtcggttttggtgccggcggcggtgcgggtcgcgaggtagccttgcaccgggccccaggcgctttcgtaattggcgtcttgcccggtgatgttggtttccggcagggccaccacaccgtcggggatcgccaccagcgtaaacgtccccgcgctgctctgctccagttgcaacccagtcccgcgcaatgcctcacgcagcgcgccctgtgcatcgaactggcctttgaccggggccgaggttttgcccgaggccagcgacgggttgagcgtcagtgccaagccggcctggctggcgatctggttcaaggtggtcgccagcggcgccgccggcaggttgtaggcgcgcacgctggaggcctgttcggcggcgatcagcgaggtgctggccagcggggcgctgagggcgatggccagggctaacaggctggggcgcaacaaggtgtcgagcgtgcgggacatggggaaggctcctgaatggaaatatttctcaattgcctaggtgccgagcgagaatcgaaaagtgatagggcggggtgaaaatatttttcggggtgttctccagggccccatcgcaggcaagccagctcccacattttgctttgtgaacaccgtcaaatgtgggagctggcttgcctgctatagcaatctccggggcctctggaagcctaaggcttacccttgaccgtcacccaccacggcgtgtgctgctcgatctgcaccggcagggtcggcagcagggcattgagcgccagcgtggtgtcatgcagcgggaagctgccggtgatgcgcaaagcggcgacgtttttatccacacccaggtagcccgtgcggtagcgccccagttcgtcgatcacatcgctcaaacgtgcgttgtcgaccaccagcatgccgcgcgtccaggcgtcggtggcgggcgtgacagccagcaccgggccgagaccatcactgcgcatcagtacttgttggccttccttgaaaatctgttcctggcgcaacgcctcaggctgggccgccacggcggattgcagcacgctcaggcgcgtagcgtcgtcttcacgcctcacgataaaccgcgtgcccaacgcccgcaggctgccgtcgcgggtttgcacataaaacggccgtgcatcgttgtggccggtttcgacgaggatttcgccttcctgcaacacgatcagccggcgcttttcatcaaagcgcacgtcgatcgcgctgtgggtgttgaggttgatcagcgtgccatccgccagtttcagcgtgcgttgctccccggtggcggtgcgttgatcggccagccaatagtggatcggcacgtaacgctcaccggcaaacagtgccaggccaatcaccagcgccacactcgccaggccgctgcccagcttgcgcacgcgttggcgaatgctttggcgcgactgcaacagcgccgcccgtgccgggcccgaggccgcgctgaaacgctgatcgagcatccccagttgacgccacgcgcgggcgtgttcttcatggctggccagccatttgtcgaactcttcgcgctcgaccgggctgccgtcacccgaatcgagggagagttgccaggcaattgccgcatccagcacacgcgccgaaaccggtttggcgcctgtcacagcggctcgccatacagcgcgatgtagcactggcgaatgccctgggccaggtactggcgtacacgcggcaccgacacgccaaggcgcgtggcgatttcggcgtggcccaggccgtcgaggcggttatagaggaaggcggcgcgggccttgctcgacagcttgccaagcaggcggtcgatggccttgaggtcttccaggatcaattgctgctcttcgggcgaggggtgttcgctttccgggatcagcatcaattcggcgaggtaagcctgctccagcgccgcacggcggaagtagtcgaacagcaggcctttggcgatggccaccagaaacgcccggggttcgcggggttcgcgcagctcgtcacggcccagcaggcgcatgaaggtgtcttggctcaggtcttcggcgcggctcgggcacgccacgttgcgccgcagccaggccagcagccagctacgatggtcgcgatacaacgcgccaacaagctcactgtgtggggtctggaccgacgacaaggcatcaccgaataaacaagaggtttaaactaacgagaattattcgcgattgtgtcagaggcgcagggcgtgcgcaattggcgtctgtcgggcggtgctattaaaacgatggcgcttgtttgcgccgtttccattggctcaaacgctcttgcagtgcctgcgggctatcgatttgctggcggttcgcgcggctgaacaggatgagcatcagctcggcggtggccagggcgtcggcgctggcgtgatggcgttcacccacgtgcagcttaaagtggttgatccagtcgtcgagcccggcttcacgaatgtgggcctcggggcacagcagcggggcgatgtcggccacatctagaaacgggtggcccaggcgataacccaagctgtccttgagtgcgcggcacagcatgtgttgatcgaaaggcgcgtggaaagccagcaacgggctgtcgccgacgaactccatgaagtcgagcagggcttcggccgggtcgctgccggcggcaatcgcacttgggcccaggccatggatcagcacactggggctgagctttgtttcggcacgttgcaaagtgcgttcaaacagttgggaaaagtccaccgccccgtcctcgatcaccacggcgccgatggacaacacctggtcgcggttgaggttcaggccgctggtttccaggtccacgacgacccagcgctggctgcgcaacggcccatcgcccagcaccccggacttgggcagttttgccaggcgttgctgttgttgtgcgtcgaggccgggctttttcgcacgtagccagccgaaccaactcacagctgataccgcaatgtcaggctgctttgcaggcgctgggcctgacgcagggattcacgcaggatgcgccggtcaaggtggttgaggctgtcggggtcgacgcggttggaatacggctggttttcgcgggtttgcaactggtgctgctgcatgcgggtttgctggatgaaatggtaagcctcttcataggcggcgccatccagcggttcgatgacctccttggccaccaactggcgcaggcgctccaaggtgttgttggcgtggacgccattggccagggccagcaggcgtgcgccgtcgacaaaaggcgtgaggccctgcactttcagatccagcgtggccttttccgcgcctttgcgcgtcagcacaaactcacggaaacgccccacgggcgggcgctggcgcaacgcgttctcggccagcatgcgctggaacagccggttatctgcaacctgatcaagaatgccctggcgcaattgctcgcagccacgctcgtcaccccacaccacccgcagatcgaaataaatgctcgaccccagcaggttctccggcgtcgcctcgcggataaacgcggcaaaccgccgtgcccattccgcccgtgacaggcacagttcggggttgccggccatgatattgcccttgcacaggctgaagccgcacagcgccaggctctggttgatctgttgcgcgagcggcagcagccgtgcgcgaaagtcggccgcttcggcggcatctttggcctcgaacaggatgccgttgtcctgatcggtgaacagcgtctgctctcggcgcccttcgctaccgaaacacagccaactgaagggcacgcccgggtcgcctttttcagccagcgtcagctcgatcacccggcacacggtgtgatcgttgagcagcgtaatgatgtgagtgatctgggtcgacgaggcgccatgggccagcatgcgctcgaccaattggccgatctcgccgcgaatcgccaccaggttttccacccgtggcgcgttgcggatggtacgggccaggtgtaccaggtccacgcgttgcagggaaaacaggtcacgctcggacaccacgccgcacaggcgttgatccttgaccagacacacgtgggcgatgtgccgctcggtcatggcgatggcggcgtcgaaggcgctgtggtcaggcgtcaggaagaaaggcgcctgggtcatgtgatgttcgatgacctgattgaaatcgctggcgccgtcagccaccacttggcgcaggtcgcgcagggtgaaaatacccaggggcgctttgtgctcgtccacgatcacgatgctgcccacttgctgttcatgcatctgcgtcactgcttcgcgcaacggtgtgttcgggctgcaggtaaccggatggcgcatggccaattcgccgaggcgggtgttcagcgaatattgggtgccgagggtttccacggctttttgctgcacctgctggttgatctggtccagcaggctgctgacaccgcgcaaggcaaagtcgcgaaaggggctggaaagcgcgaacagcttgataaaggccggcttgttcagttgcaggcaaaaggtgtcttcggcggccttgtgctcggtacgggtcgcccgctcacccagcagtgcggcgaggggaaagcattcgccggtggtgatttcgaaggtagtttcggtggaatcgggccgctcacccaccacccggccttgtttgacgatgtagaaatgctcaaccggcccgcctgatggcttgaggatgctgtccccaggtccatagaagcgcagttggcattgttcgaccagaaacgccaggtgcgcgttttccatctggttgaagggcgggaagcgttgcaggaattgcagggtgccgtggatgttctgcaacacggcggtttttcccgcttgggcgaaagcatcagctttactcataacagtgaccgcagtttttttgtcgttatcgtgcctcatggtcgacttccgcgcggcgagtgcccattggacgtaagtctaggtcgaggaaaaccgtgcagaactagggaaaaaccttacatggctattgtccaaaccccgtagaacgcccactaggcaaactttccgacgaagtgcacattgttcgcccttccgcagatgtctgacgagtgtgctgggagattgatgagaactgctgagaaacgtatgtccgaccacgatattttgagtgatgccgagcgcgaggcgctgagcgccgtcatgctggagcccgatttaccgccacaacgcgtgttgattgttgacgacgacaaggacgcgcgtgaactgctggcggaaatcctggggctggacggcattcgctgcatgaccgctgacagcggcgagtcggcgtgggacttgttgaagtccagtagctctatcggtttgctcattaccgacctgcgcatggcaccgagcaatggcttggaacttattcggcaggtgcgtgaatccacacgtgcggcgctgccgatcatcatcatgtcgggggacgcggaagcgccggatgtgattgatgcgatgcatttgagcgtggtggattttttgctcaagccgattgatagcgtgaagctggcgaagatggtcaagcgggaattggggatggcttcctgattttgcggtgactgggcgggccctatcgcaggcaagccagctcccacatctgaccgagttcctacagacatacgcgatcacatgtgggagctggcttgcctgcggatgaggccgccacagtcaccacaacactcaaaaaaagccccgatctcacgatcggggctttttcatttacaggccgtttttagccttgaattcccggcgccggcgatgcaacaccggctcggtatacccattgggctgtttagtcccttcaatcaccaactccaccgctgcctggaacgcgatgttgctgtcgaaatccggtgccagcggacggtacagcgcgtcaccggcgttctgacggtccaccaccggcgccatgcgcttgaggctttccagcacctgggcttcgttgacgatgccgtggcgcagccagttggcaatgtgctggctggaaatgcgcagggtggcgcggtcttccatcaggcccacgtcgttgatgtccggcaccttcgagcaaccgacgccttggtcgatccagcgcaccacataacccaggatgccctgggcgttgttgtccagctcgttgcggatttcttcgtcggaccaatcggtgttgggtgccagaggaatggtcaggatgtcgtccaccgaggcgcgctcgcgcttggccagctcggcctggcgggcgaacacgtcaaccttgtggtagtgcagagcatgcagtgcggcggcggtgggcgaaggcacccaagcggtgttggcgccggccagtgggtgagcgattttctgctcaagcatcgccgccatcaggtcgggcatggcccacatgcctttaccgatctgcgcgcggccttgcaggccggtgctcaggccgatatcgacgttccagttttcgtaggcgccaatccatttttccgccttcatcgcggccttgcgcaccatcgcgccagcttccatggaggtgtggatttcatcgcccgtgcggtcgaggaagccggtgttgataaataccacgcgctcgctggccgccttgatgcaggccttgaggttgaccgtggtgcggcgttcctcgtccatgatcccgactttgagcgtgttgcgcggcaggttcagcacgtcttcgatgcgaccgaacagctcgttggtgaacgccgcttcttccgggccgtgcatcttcggtttaacgatgtacacggaacctgtgcggctgttcttgcggctgctggtgccattcaagctgtggatcgctgccaggctggtgatcaggccgtcgaggatgccttcgggcacttcgttgccggctttgtcgaggatcgcgtcgatggtcatcaagtggccaacgttgcgcacgaacagcagcgaacgcccgtgcagggtcacatcctggccattcacgccggtgtacacgcggtcggcgttcatggtgcgggtgaaggtcttgccgcccttggccacttcttcagccaggtcacccttcatcaggccgagccagttacggtagatcactaccttgtcgtcggcgtcgacggcggccacggagtcttcgcagtccatgatggtggtcagtgcggcttccatcagcacgtctttgacgccggcagcgtcggtctggccgaccggggtgctggcgtcgatctggatttcgaagtgcaggccgttgtgcttcagcagaatcgcgatcggctcggccgcagggccctggaaaccgatcaactgagcatcgtcgcgcaggccgctgttgctgccgcccttgaggccgacgatcagcttgccatcgacgatcttgtaaccggtggaatcaacatggctgccggcgctgagcggggcggcttcgtcgaggaaggcgcgggcgaaggcgatgaccttgtcaccccggaccttgttgtagcctttacctttctcggcgccgttggcttcgctgatggcgtcggtgccatacagcgcgtcatacagcgagccccagcgcgcatttgaggcgttgagggcgaaacgggcgttcatcaccggcactaccagctgtgggccggccatgcgggcgatttcgtcatcgacgttttgggtcgtggcctggaagtctgcagcttctggcagcaggtatccgatgtcttgcaggaaggctttgtaggccaccgcgtcgtgcgcctggccggcgtgggtctggtgccaggcgtcgatgcgcgcctggaaatcgtcgcgtttggcgagcagggctttgttcttcggggccaggtcgtggatgaccttgtcggcgccggcccagaactgctcggcagtgatgccggtgccgggaatggcttcgttgttcacgaagtcgaacaggactttggcgaccttaaggccaccgacttgaacgtgttcagtcatctcttgcctcactctgcggagcttatgcgcttttcagcttttcaatttaccaatgaagcctctggccatttaaaccacgaacccgatcccccggtacatgcctgaaaaaggcggctgggctggcggatttcgcgatacgtaggtgccttggcagacatcgacctaacgttatgtagtgcgcgattgggcatactacatgatgacttgcggttgtgaaaatttgactaaatacgtcgtttagcgaccctcctgtgacattcggtcacagtggggaatgggatgttctcaaaaaactatcggattgttccagataaatataaaaatggtacacgattttttttcgagggctcccgagtccaccttgtagattgaattcagagggcttcgccatggaccatcttgtactcactattatcgctgccgacaaacccggcctcgtcgaacgcatcgcacagaacatcgccgcccacggtggcaactggctggaaagccgaatggcgcacatggccgggcagtttgccgggatattgcgcgtcggtgtaccggccgaaaaccgccaggcgttggtcggtgcgctggaagatttatccacacacggtattcgcgtgttggtgggcgagggcagtaccgggcaggcagtggcgtccaagtcgatcctgatgacgctggtgggcaacgaccgctccggcatcgtgcgcgagattaccgcgctgttgagcaagcagggtgtgaacctggagagcctcagcacggacgtgcgcccggcgcccatgagtggtgacccgttgtttaccgccgaggcgctgttgcaggtgccagccgcgctatccctggataccttgcagctgtccctggaaaccctggcggatgacttgatggtggagctgcaccacgaggaataatttgcccacacaggttatgcatggaaatcttgcatgggcctgtggataacctgtagagacccgacgccgggccaggccggccgggcttcttcgcctgttgagcaaaaaacgagcagtttcaagggcttgtgcacaaatggcggggatcaggttgtggataaccttggggtgaatgcctgcaagccacgccggctgtggcttgcaggggtttgtacgttatttgatcaacgtttgcgagcgctgagccagatatccacgctgtacaccaccaagccggcccagatgaacgcgaaggcagtcagcgtactcggcgccagatgttcaccgaacagcagcacggcttccagcagcaccaatgtcggtgcggtgtactgcaaaaagcccagtgcggtgtagggcaaatgccgtgcagcggcgttgaagcacaccagcgggatcagcgtaacgggacctgcggccaccagccaccaggcttcggacgtgctccagaactcggactgcaaactgtgggccgacgggttgaacagcaaccacgccacggcaatcggcaccagcatccaggtttccaccaccaaccccggcagcgcctttacgggtgcctgtttgcggatcaggccgtagaaaccaaaggtcatcgccagcaccaacgacacccacggcaaactgccgacctgccacacctgttgtgccaccccggccgcggccagcccgaccgccacccactgcaggcggcgcaggcgttcgccgaggatcagcatgcccagcaccacgttcaccaacgggttgatgtagtaccccaggctcgcctccagcatgcggccgctgttgaccgcccacacataggtcagccagttggccgcgatcaacgagccgctgagtgccagaatcgccaggcgcttggggttgtcgcgcaactcgcgaaaccacccggggtgcttccacaccatcaacagcaaaccgccaaatagcgcggaccagagcacgcggtgcacgatgatctcggcggcgggcacgctggcgatggctttgaagtagagcgggaacaggccccaggtgatataggcgctcaggcccaggatgtaccccttgcgagggttggcggcgtgcattgcagaatccttgcttaggcagctaacaaagcgcgattgtaaggatatttgccaggtaacgggtggtgcttttctgtgggagctggcttgcctgcgatagcatcaccgcagtgcagcagttaaaccgaggtgcctgcatcgcaggcaagccagctcccacacaagccacccacaggggagtgtgaggtcagaagagtttcagcggttcttcgttgagcgccgacaactgctcgcgcaacgccagcacctgatcgccccaataccgctcgctgccaaaccacgggaagctgtgggggaacgccgggtcgtcccagcgccgtgccagccaggcgctgtagtgcatcaggcgcagggcgcgcaatggctcgatgagcgccagttcgcgcgggtcgaaatcgtggaattcctgatagccgtccattaactccgacagttggccaaggcattcctgacggtcaccggcaagcatcatccacagatcctgcaccgccgggcccatgcggcagtcatccaggtcgacgatgtggaacatctcgtcgcggcacatcatgttgccggggtggcaatcgccgtgcatgcggatgttcttgtgcggcgtggccttgtacacctcttccacacgcttgagcaggtcgcgcgccacggattcgtaggcgggcagcaggctcttgggaatgaagttgccttcgagcagggtattgagggaatcgtgaccgaagtttttcacgcccaacgcttcacggtgttcgaacgggcgggtggaacccaccgcgtgcaaacggccgagcaattggccgaggcgatagagttgatcaaggttgcccggctctggcgcgcggccgccacgccgtggaaacagagtgaaacggaagcccgcgtgttcgaacaggctctcgccgttgtggatcagcggcgcaaccactggcacttcgcactcggccagttcgaaggtgaagcggtgctcttcgaggatggcttcgttggtccagcgctgcggccggtaaaacttggcgatcagcggctcggcgtcttcgatgcccacctggtacacacggttttcgtagctgttgagcgccaacacgcgcgcatcgctgagaaaaccgatgctttcgaccgcgtcgagcacgaggtcgggggtgagtgtttcaaacggatgggccatgcgaactcctgcgcgcagcagggcgccgcgtccggccgggtatggtaacgcaccggggccgagataggtggtggctgttctggcgctatcgcaggcaagccagctcccacctttgaatgtattcaccattcgaaatgtgggagctggcttgcctgcgatgaggccgtatcaggcgccgacgatgccgccgtcatcccgtcggatcgccatcaccgacgaccgcggcttaccgttcggcagatgctccggccaggtcgaaccccccgtttcgcccgggtgctgaatacccacaaacaaggttttttgatccggcgagaagctgatgcctgtcacttcgcaagcgaccgggccgaccatgaagcggcgaatttccccggtggatggatctgcgcacagcatctggttgttgcccatcccggcgaagtcgcccgcgttgctgtagtcgccatcggtgagaatccacaagcgcccggccttgtcgaagcccaggccgtcggggctgttgaacatgttctgtgggttgatattcgacgagccgcctttcggcgtgccggcatgcacgcccgggttgccggccactacaaacaggtcccagctgaagtccgctgcgccgtggtcatcggcgttggccttccagcgcagaatctgcccgtagacgtttttctcacgcgggttagggccgcccaccggctggccgtcttcgccgcgcttggcgttgttggtgagggtgcaatacacctggccgtcggtggggctgaccacgatccattccgggcggtccatgcgcgtggctttcaccacgctggcggccaggcgcgcgtggatcagtacttcggcctggttggcgaaacccgagctggcgtcgatgccgtttttgccatgggtcagctccacccattggcctttgcccttggggtggtcggcgttgccgtcgcccgcgtcgaagatcgccacaaacaaggtgccgtgatcaagcaggtctttgttggccttggggttcttgtggttgatcttgtcgcggctgacgaacttgtagatgaactcaccgcgctcgtcgtcgcccatgtacaccacggcgcggccatcgcgggtttcggccagggcggcgttttcatgtttgaaacggcccagcgcggtgcgcttggcaggcgtggattgcgggtcgaacgggtcgatttccactacccagccatggcggttgagttcgttggggttcttggccatgtcgaagcgcggatcgtgttgatgccagttgatgtctttgctggcagccaccacgccgtagcgtttttgcccggcgtcgaaggtctgttgtgggttactgctgccgaagcagtcggtgaagttctcttcgcacgtcagataagtgccccacggggttttgccgttggcgcagttctggaaggtaccgagggctttcttgccggttttgtcagcgcttgttttcagccagtcgtggccggcggccgggccgctcaggcggatgggcgagttgccgtggatacggcggttgtagcgcgagtcctggacgaactgccaggtgtcgcccttgcgccgcacttcaatcaccgacacaccttcgctggcctgggccttgcgcacgtcttcggtcgactgcggcgcgccgccgtgggcgaagaggtagcgatagttggtgtattcgttgttgatcgccatcagcgcgcggttgttatcgccggggaaggcgaacaggctcatgccgtcgttgttgtcgccgaactgctgctcctgggccttggcggtgccgttgccggacgggtcgaaggccggggcgtttttgctcaacggctggccccaactgatcagcaccgaggcgctgtagcccggcggcaaggtgatggcgtcgctggtggcggcggcgatgctggtaaaacccagcagcgggctggcggaggcggcattcacggccagtgcactgcgggtgagcaggttgccgcccaggaacattgcggcgccgcacaaggcgcctgcgccgatgaaacggcggcgggtgaggccgaccatctgctcaaggtcggtggcttggttttcttctaataggctcatttcaggctccctgcggtttttgcagacaccttaaggagcgctcgtgacgaaattgttgcagtttgaaggctgtgcagcgctataccggcgtgccgagcaacacattgctcggcgcgaactgcacctggatcggctggccttcggccgcgcgcaacgccttgagcgcggcgggctgcgccagggcgcacagcacgaggccgttgggcagggcgatacgcacttcgctcgggccgtcatcggcgtctagaatcgcgtcgataaggccgctcatgcaattgtgtccaggtgttgcggcttgcccggctgcgagcaactccagccagccggccttgatcaacgcaatcacctcgacgccagtctccagctccagccgctgcgtgctgtcgtgggtgatttgcgcctccagcgtcaggccgccgaccagttgcaggcggatcacgtcgttgcggccatggctgtcgatggcgacgacctggccgtgcaactgattgcgcgcgctggtgcgcaacatcaagcggcccaacagattgaagtcgctggcgtcctcatccgagccgagtatctcggcctgcaacacttgcaggcgctgatagaggcgcaacacgcgttcaccttcagcggtgagcctggcgccaccgccgcctttgccgccgacactgcgctccaccaaggggtgctgcgcgaggttgttcagctcatcgatggcatcccatgcggccttgtaactcaaaccggcgctttttgccgcacgggtgatcgagccttgctcggcgatatgcgccaacagggcaatgcgttgggggcggcggatgatgtgttggctgagtgaggtcggcagagacatgtggatacgcttttataaggtcagcggacgttgcaggcgctgcgcacgagagtcaagtcatgcgcccggttttggtgtgcgcgccaggcagtagacgtcgacctggcgggcgcccgcatccatcaacagccgggccaggctgtgggcagtggcgccggtggtcagcacgtcatccaccagcgcgaagtggcggccttgcagctgggcaccgggtgccagcgcaaacgcagtgagcaggttgcgctggcgggtcttggcgtcgagggcttgctgcgcgacggtttcatgggggcgtaacaacacctgttcattgtgtgggaggtcgagacgttcactgagccagcgcgccagcatctgcgcctggttgaagccgcgttcacgcaggcgcttgcgcgccatgggcaccggcagcaggcagtcggggcgaatgagttcggtgttgtcgaagcgatgttgcagatgacgccccagcaggcgcgcgagcatatggccaaagggccagcgcgattggtgcttgaagcgggtgatcagggtgtcgactggaaagccgtaggtccagggcgcgatcacctgtttaaaggccggtggttttttctggcattgaccgcaggtcagcccttccatcggcaagggcagagcgcacaccttgcactgttccatcagccatggaagctcggtttcgcagacgttacacacacaatcggccgattcagccggctcatcgcaaattaaacaggtatggttgttttttgaccagatgtaaacctgatgtttgtggtccggttgacagtgcatgaatcttccttaaatatgccgagcatccgtgtcgtgactgtgggtattacctctccacagtgaaagcccaagcataatcaaggaaacgcccatgagcgccagcacctctgccaccctgcgtcacgattggtccttagccgaagtcaaagcgctgttcgtgcagcctttcaatgacctgttgttccaggcgcagaccgtgcaccgcgcgcatttcgacgccaaccgtgtgcaggtgtcgaccttgctgtcgatcaaaaccggcgcctgcccggaagattgcaaatattgtccgcagtcgggccactacaacacgggcctcgaaaaagagaagctgatggaggtgcagaaggtcctcgaagaggccgctcgcgccaaggccatcggttcgacccgcttctgcatgggcgccgcctggaaacacccgtccgccaaagacatgccctacgtgctgcagatggtcaaaggtgtgaaagccatgggcctggaaacctgcatgacccttggccgtctcgaccaggaccagaccgaagcgctggcccaggcgggcctggactactacaaccacaacctcgacacctcgccggagttctacggcagcatcatcaccacccgcacctacagcgagcgcctgcaaaccctggcctacgtgcgcgactcggggatgaaaatctgctcgggcggcatcctcggcatgggcgagtccctcgacgaccgcgccaacctgctgatccaactggccaacttgccggagcacccggagtcggtgccgatcaacatgttggtgaaggtggccggtacgccgctggaaaacgccgaagacatcgacccgttcgatttcatccgcatgctggccgtcgcgcgcatcctgatgccgcaatcccacgtgcgcctgtcggccggccgcgaggcgatgaacgaacagatgcaggccctggcgtttttcgccggcgccaactcgattttctacggcgacaaactgctgaccaccgccaacccgcaggctgacaaggacatgcaactgttctcgcgcttggggatcttgccggaagcccgtgaagagcatgctgacgaagtgcatcaggcggcgatcgagcaggcgctggtggagcaaaagagcagcgggcagttctataacgccgtggtttgacgcctagatcttcatttggaatgccttccaaatgtgggagcgggcttatgtgggagccgggcttgcccgcgatgcaggcacctcggtgtgtcagttacacagtggtgatgctatcgcagcggtgcggcgatccgacaagccagctcccacacaagccagctcccacagtgagactgtgttcatccagacctatccgaggccagcatgtctttcgatctcgccgcgcgcctcgctgcccgccgtgccgaacacctctaccgtcaacgcccgctgctggacagcccccaaggccccgaagtggtggtcgacggccaacccttgctcgccttctgcaacaacgactacctgggcctggccaatcacccgcaagtgatagaagcctggcgcgccggggcgtcccgttggggcgtgggcggtggcgcctcgcacctggtggtcggccacgccacaccgcaccatgagctggaagaagccctggccgatcttaccgggcgcccccgggccttgctgtttaccaccggttacatggccaacctcggtgcggttaccgcgctggtgggccagggtgacacggtgctggaagatcgcctgaatcacgcgtcattgctcgatgcaggcttgctgtccggtgcgcggttcaaccgctacctgcacaacgacgccgacagcctggccaaacgccttgagaaggccaccggcaatacgctggtggtcaccgacggcgtgttcagcatggacggcgacctggccgatttgcctgcactggcccgccaaacccgtgccaaaggcgcctggctgatggtggacgatgcccatggtttcgggccgctgggtgcaaacggtggcggcatcgtcgagcatttcggcctgagccaggaagatgtgccggtattggtcggtacgctgggcaaagcgttcggtaccgccggcgcttttgtggcgggcagtgaagcgttggtcgaaagcctgatccagttcgcccggccctatatctacaccaccagccagccacccgctctggcgtgcgccacgctgaaaagcctggagctgctgcgcactgaacattggcgccgtgagcacctcaatggcctgattcgccagttccgccagggcgccgagcagttgggcctggacctgatggacagcttcacgccgatccagccgatcctgatcggcgacagcgccaaggctgtgcgcctgtcacagatgctgcgcgagcgcgggctgatggtcaccgcgatccgcccgccgaccgtgcccgccggcagcgcgcgtttgcgtgtgaccctgacggcggcccacagcgaagcgcaggtgcggctattgttaaacgcattggaggagtgtttccggttgttaagcattacggagcccgaccatgcgtgaccgattgatcttgttgcccggctggggcctcggcgtttcgccgctggaacctttggccgccgcgttgcgcgggctcgacgaacatctgcaggtgcatatcgagcccttgcctgtgttggattccagcgacctggatgaatggctcgacgaactcgacgccacgctgccggacaacgcttggctaggcggctggtccctgggcggcatgctcgcctccgagctggcggcgcggcgcggcgagcgttgctgcggcctgctgaccctggcgagcaactcgtgttttgtcgcccatgacggctggccgaatgcgatgcctgccgaaaccttcgacgcgttcctggccggttgccacgccgattcccaagtcaccctaaaacgtttcggcctgctgtgtgccaagggcgccgaagacccgcgcgggctgtcgcgcctgttggtcagcggcgcaccgactgcgccgtccagcgtgctgatgcccggcctggaactgctcgcccagctcgacacgcgcgcagccttgctcgcctatcgcggcccgcaattgcatgtgttcgccggcctggatgggctggtgcccgccgaagctgccagcgacctgctggctttgttgccggatgttgaaatcggcctgattgaacaggccggtcacgcttttcttctggaagacccccacggtgtagcgggcgccatccaggcttttttgcatgagtacgttgatgactgatctggcccacccaccactgccgggcgccttgccggacaagcgccaggtggcggcgtccttctcccgtgcggccgccagctacgacagcgtggccgaactgcaacgcgcggtgggccacgaattggtggctcgccttccacaggcaatcgcaccgcaacgctggctggacatggggtgtggcaccggttatttcagccgcgtgctgggcgagcgcttgcccgccagccaaggcgtggcgctggatattgccgaaggcatgctcaaccatgcgcggccattgggcggcgccgagcagttcatcgccggtgatgccgaacgcctgccattgcagggcggcagttgcgggctgatcttttccagcctggcggtgcagtggtgcgcgaacttcgatgcggtgctcagcgaggcttgtcgcgtgctgcaacctggcggtgtgttcgcgttcgcgagcctgtgcgtgggcacgctggatgagctgcgtgaaagctggcgcgcggcggacggcctggttcacgtcaaccgtttccgcacctttgaggcctatcaacagttgtgcgcaaacagcggtttgcgcgtgcgcagcctggagcgccaaccccatgtgctgcattacccggatgtgcgcagcctgactcacgaactgaaagcgctgggtgcacataacctcaacccgggccggccgggagggttgacgggccgcgcgcggattgttgcactggtggacgcttacgagcagttccgtcaggcccagggcctgcccgccacgtaccaagtggtgtacgccgtactggagaaaccgctatgagcgctgcttatttcatcaccggtaccgacaccgatgtcggcaagaccaccgtcgccgccggcctgctgcatgccgcacggctggcgggaaaaagtaccgctgccggaaaacccgtggcctcgggctgccagttgacgagcaaaggcctgcgcaacagcgatgcgttggcactgctggccgagtgctcattggcgctgacgtatgaggaggtcaacccggtggctttcgaaccggccatcgcgcctcacttggcggcacgggaggcgggcgtcgggctgacggtgcagtcgttgttgaagccaatgcagcagatcctggcgcgtcaggcggacttcaccctgatcgagggcgcaggcggttggcgcgtgccgctggctgggcaggacaacctgtcggacctggccatggcgctcaagctgccggtgattcttgtggtaggcgtgcgcctgggctgtatcagccatgccttgctcacggctgaagccattgcgcgggacggtttgccgttggcgggctgggtggcgaatatcatcgaccccaagacctctcgtctggaagagaacctcgccaccctggctgagcgcttgccggcgccatgcctgggccgggtgcctaaactcaagcacgccggggctgcagcggtggccgagtacctggagttggacctgcttgactgattttggctatcgcgaaggcattatgccattagtgtttttgacgggcattttgccggaatgtctgcttcaatccaggttcatgattctctaaaggcaggcttacgccatggaaatctctggaagcagcgcgttttattcggggctgagcagcattcagaccgggcagaaccgtgtcgaccaggcggccggcaaaattgccggtaacgcgacgacccagccctcggatgcacaaagtgatcgcttgcaagccaacgatcgcgcccagccgtccaattcggcgagcaacatggtcgaaatggcccagggcaagtttcaagtggagctgggcgcgaaagtcgccaaggcttcggatgaaatgctcggcacgttgatcgacacgtacgcttaatctacctgtgtgccggctctcgccttctgtgggagctggcttgcctgcgatggcatcgactcaatcctcctgatacaccactgcgtctgcatcgcaggcaagccagctcccacatttgccctgcgtcaccgcgcagaactcctaaactcctttttgacgtggcatcgcgccgcaggccttgccgtgcttggggttgattcatgtcatgacaaacggcttctggacgacgcttgacatccccaggtcgtaaacgtatgtttcaaacacctgtttgaccgccaccacacatccacgcggttgttcatcccagatacatcagcagaggtttatcgctatgcctgactacaaggcccccttgcgtgatattcgcttcgttcgtgacgaactgcttggctatgaagcgcactatcagagcctgccggcttgccaggacgctaccccggacatggttgacgccatccttgaagaaggcgccaagttctgtgagcaagtgctggcaccgttgaaccgcgtgggtgacatcgaaggttgcacctggagcgagtcaggcgttaagacccctaccggcttcaaagaagcctacaaacaatttgtcgaaggcggctggccgagcctggctcacgacgtggagcacggcggccaaggcctgccggaatccctgggcctggcggtcagcgaaatggttggcgccgccaactggtcgtggggcatgtaccctggcctgtcccacggtgcgatgaacaccatttccgagcacggtacccctgagcagcaagacgcctacctgaccaaactggtgtcgggcgaatggaccggcaccatgtgcctgaccgagccgcactgcggcaccgacctgggcatgctgcgcaccaaggccgagcctcaggccgacggttcctacaaagtctccggcaccaaaatcttcatctcggccggtgaacacgacatggccgacaacatcgtccacatcgtactggcccgcctgccggacgcaccggccggcaccaaaggcatctcgctgtttatcgtgccgaaattcctgccaaacgccgacggttcggtcggtgagcgcaacgcggtgacctgtggctccctggagcacaagatgggcatccacggcaacgccacctgcgtgatgaacttcgacgcggccaccggtttcctgatcggcccggcgaacaaaggcctgaactgcatgttcacctttatgaacaccgctcgcctgggtaccgcgctgcaaggcctgtcccacgctgaaatcggtttccagggcggcctgaagtacgcgcgtgaccgcctgcaaatgcgctccctgaccggcccgaaagcgccagacaaagccgctgatccgatcatcgtgcaccctgacgtgcgccgcatgctgctgaccatgaaagccttcgccgaaggcaaccgtgcgatggtgtacttcaccgccaagcaagtggacatcgtcaagtacggcaccgacgacgaagccaagaaacaggctgatggcctgctggccttcatgaccccgatcgccaaggccttcatgaccgaagtcggttttgaatcggccaaccacggtgtgcagatctacggcggccacggtttcatcgccgagtggggcatggagcagaacgttcgcgacagccgcatttcgatgctatacgaaggcaccaccggcatccaggcgctggacctgctcggccgtaaagtgctgatgacccaaggcgaagcgctcaagggcttcaccaagatcgtgcacaagttctgccaggccaacgaaggcaacgaagccgtcaaagagttcgttgcaccactggcggcactgaacaaagagtggggtgagttgaccatgaaggtcggcatggccgcgatgaaagaccgtgaagaagtcggtgctgcctcggtggactacctgatgtactccggttacgcctgcctggcttacttctgggccgacatggcgcgcctggcggccgagaaactggctgccggcaccaccgaagaggcgttctacaacgccaagctgcagacggcgcgcttctacttccagcgcatcctgccgcgtaccctggcccacaaagccaccatgctgtcgggtgccaacaacctgatggacatgaaagaagaagacttcggcctggcttactaagccttccggttctcttgaaaaccgccgcttccctcgggagcggcggtttttttatacgtgataaaaaacacagcgtggcactcagggattgcagttggcggccgttacagtgatggcaatgtgatacaggtcacattgaatgtgcttaactgtgtgcagtgaaggcactgtgccatctgtctgggcgggtcggagctttacccttgtcacgcgtgtctgctgtacgtttcagtcattttcttccttcgttgctgctgttaatggccgggctctcggctgcgtacgtcaaagacctcaacgtgttcttcacctcgctgttcaacgtgctgcccaccctggtgctgttgcttggcggttcttattgcgcggtgtatcggcgccagcgtgaactgttcctgatgatcacggtgtacatcgtctacttcttgctggacacccagaccgatttctaccgcgacaacggccgtgtacgcgaagacgccgccgtggtgtttcacctgtgctgcctgctgctgccgttgctgttcagtatttacgcgctgtggcaggaaaagacccacctgttccgcgacttcatcgcacgctgcgcggtgttggtggctgtgggcagcgtggcattggcccttgagcaaagctttccccaggccgtgctgagctggttggcggaaatccgctggccggcattgcatggcagctggatgagcctgatccagctgtcgtacccgatgttcctgatcggctttcttaccttggcggcgcagtactggtaccagccgcgcccgctgcacgccgcgcaattggttggtttgctggggctgttctggatgttgccgcaaaccttcatcttgccgttcaccctgaatatcatgtgcagccaagtgatgctgatgattgccgccggtgtggcccacgaggcgtaccagatggcgttccgcgacgagttaacgggcctgccggggcgccgagcactaaatgaacgcatgcagcgtctggggcgcaactacgtgctggcaatgaccgacgtcgaccacttcaagcgcttcaacgacacccatggtcacgacgtgggcgaccaggtgctgcgcctggtggcgagcaagctgtcgaaggtcaacggcggcgggcgagcctaccgttatggcggagaagaattcgcggtggtgttcgcgggcaagaccctggatgaatgcatgccgcacctggaggagatccgcgagattattgccgactacgacatcaagctgcgcaacccggaccgcccgcacgacgaccatcagggccgtcagcgccgcgtgggtagcggcgcgtcgagtgtgtcggtgacggtcagcatcggcgtggccgagcgtcaggccgagcagcgcacgccggaagaagtgctcaagtccgccgaccaggcgctgtatgccgccaagggcgcggggcgcaactgcgtggtcgcggccgggcaaacccggcgcggcgcggtacgcatggaagccgctgccggttgagtgatggcggtgtattcagcggttctacagtgattgttcgaggcgctggccggcagtaggttgaaggcatctgctgccggagacattgccatgcctgagtacaaagctcccctgcgcgacatgcgctttctgatcgacaacgtatttgatttccacggccattacgcggcgctgggcgccaccgatgccagcccggacatggtcaatgcgatcctcgaagaaggcgccagattctgcgaaaacgtgctcgcgccgctcaaccgcagcggtgacgaagaaggctgccatttcgagagcggcgtggtcaccacgcccaaaggcttcaaagaggccttcgcacagtatgtagaaggcggctggcacggtttggcggcggacccggtctacggtggtcaggggttgccgtcgtccctggggctggtactcagcgagatgattggctccagcaacacctcctggggcatgtaccccgggctgacccacggcgcgatgacggcgatccatgcccatggcactgaagagcaaaaatccacttacctgaacaaactcactgcgggcgaatggaccggcaccatgtgcctgaccgaagcccactgcggcaccgacctgggcttgatcaagacccgcgccgtgccccaggcggacggcagctatgcggtcaccggcagcaagattttcatctccgccggcgagcacgacatgagcgccaatatcatccacttggtgctggcaaagctgccggacgcgccggcgggcaccaagggcatctcgctgtttatcgtgcccaagttccatgccgactcgggcgagcgcaacgcagtgcactgcggcgccatcgagcacaaaatgggcatcaaggcctcggccacttgcgtgctgaacttcgatggcgccaagggctttctgatcggcgaggccaacaaaggccttaactgcatgttcaccatgatgaaccacgcgcgcctgggcaccgggatgcagggcttgtgcaatggcgaggcgagttttcagggcgcgatcagatacgccaacgaccgcctgcaaatgcgctcgctgaccggcgccaaagctccggaaaaagccgccgaccccatcatcgtgcaccccgacgtgcgccgcatgctgctgaccatgaaggccttcaacgaaggcaaccgcgcgctgacctacttcaccgcacaattgctcgacaccgcgcacctgagcagcgacaccgcggcacgccaggaagccgaagacctgctggcgttcctcacacccatctgcaaagccttcatgaccgacaccggccttgaggtgaccaaccacggcatgcaaattttcggcggccacggctacattcgcgaatggggcatggaacagctggcgcgtgatgcgcggatcgcaccgatctatgaaggcaccaacggcattcaggccctcgacctgctggggcgcaaggtgttgggcagccaaggtaagttgctgcgcgggtttaccaagatcgtgcacaagttctgcgcggcgaatgtcgagcatccgcagctcaaggcttatgtggcgcagcttgatcaactgaatggggaatggggcgagctgacgatgaaagtcggcatggcggcgatgaaaaatcccgacgaagtcggcgcggcggccgtggattacctgatgtacagcggttacgtcatccttgcctacttgtggctgcgcatggcgatcgcggcacaatcacatgacgacgctgagttcgcccaggccaaattggccacctgcgatttctacttcaaacgtctgctgccgcgcacggccacacaccgcgccgccgtggaggcggggagcgaatgcctcatgagcttgcctgctcagctatttgccttgtaaaggcgactgattcaccgcggtcaaaatgtgggagctggcttgcctgcgatgcgggcacctcggtttgtcaggtccaccgaggtgatgccatcgcaggcaagccagctcccacacaaggccacattagagttgcttggtgactaataaataccaaatggtcacaaaaagaccctatgtgtctgaaaagttgttcgggtacactctgagcctgtaaaaccgatcctgccgaattactttttacgttctcacgaggtttgccatggctgattacaaagcgccgctgcgtgatatgcgcttcgtcctcaacgaagtttttgaggtcgccaacacttgggcccaattgccggcattggcaggcaccgttgatgccgaaaccgtcgaggcaattctcgaagaagctggcaaagtaacagccaaatccatcgctccgctgagccgtagcggcgatgaacaaggctgccgctgggacaatactgcggtgttcacgccggacggtttccctcaagcctacaaaacctacgccgaaggtggttgggtgggcgtgggcggtgacccggtgttcggcggcatgggcatgcccaaggcggtgtcggcccaggttgaagagatgatcaactcgtcgagcctggcatttggcctgtacccgatgctgacttccggcgcttgcgtgtcgatcaacacccacgccagcgaggaactcaaggcgacctacctgccgaagatgtattcgggcgagtgggccggctccatgtgcctgaccgaggcgcatgccggcactgacctggggattatccgcaccaaggctgagcctcaggcggatggttcctacaccatcagcggtaccaagatcttcattaccggcggcgagcacgacctcaccgaaaacatcatccacttggtgctggccaagctgccggacgcaccggccgggcccaagggcatttcgctgttcttggtgccgaagttcatggtcaatgccgacggcagtccgggggcgcgcaacctcgtgagttgcggctcgatcgaacacaagatgggcatccaggcttccgcgacttgcgtcatgaactttgaccaagccgtgggttttctggtgggcgagccgaacaagggcttggcggcgatgttcaccatgatgaactacgagcgtttgggcgtgggcatccagggcctggcgtctggcgagcgttcctaccagaacgcgattgagtatgcgcgtgaccgtctgcaaagccgttcgccgaccggcgccaaggccaaggacaaggttgccgacccgatcatcgtgcaccccgacgttcgccgcatgctgctgaccatgaaagccgcaaacgaaggcggccgcgcgttttccacctatgtggccacgcagttggacatcgccaaattcagcgaagacgccgctgcccgcgagcgcgcagacaacctggtggccttgctgaccccggtcgccaaggcatttctcagtgatctgggcctggaaaccaccgtgctgggccaacaagtgtttggcggccacggctatatccgcgagtggggccaggagcagcttgttcgggatgtgcgcatcacccagatctacgaaggcaccaacggcattcaggccctggatttgatggggcgcaagatcgtcggcagcggtggcaagttctacaccttgtttgcggacgagattcgccagttcatcgccaccgcaggtgccgagctgggagagttcacccggccgctcagcactgcactggataacctggatgaattgaccgcctgggtgctcgaccgcgccaagaccgacccgaatgaaatcggtgcagcctcggtggagtacctgcatgcgtttggctacgtggcctacgcctatatgtgggcgcgcatggccaaagccgcatggggcaaggaggccgaggaagatttctacgccagcaagctgggtactgcgcgcttctacttcgcgcgcttgttgccgcgtattcattccctgagtgcgtcggtaaaagccggtagcgaatcgctgttcctgctcgacgagtcactgttctaagggcttggagggcgtgtaagcaatctcttacatgacgtgctgctattcgtcctctatcgccaaattggatccacggataatctacttcacatggacgtcgcgcaggaagcgcaaagcaacaacagggacacgtaggattctgccaggatggcggagtgaaatggatgtcagggaaacagtctgcaaagccccgcttcggcggggttttcttttgcccgcgaaaaagtcaggcgcttgcctgcggggcgttcattacgtcttccagcaaggtgcgcagcaacgccaccgtcgcttgctggcgctgcacgtcgcggcacaccaaacccactttcaacggcaccctcggttcactcaagggtttccacagcaatgccttgctgttgtgctcgtcctgggagcgcccaggcagcaccgtcgccagttttgtgtgaggcaggctgtcgagaatccccgccatcgtattcagctcagcctgcacctgcgggcgccgcccgaggtttgcgagctggccctgccagatttgcctgacttgaaactcttcacccaacagcagcattggcagctccgccgcctgcttcagcgagactttcttgaattcccgcaagggatggtcttcggggatgacgaccttcaactcatcttcgtacaacagcacaccggttaacccaggttgtcgcggcggcaagtagctgatgccgatatccagcgagccattcaacaaccgccgctcaatctcaagcccggtcaattcgtagatctgcaccaccagatgcggctgggccttgcgcacgcgttccagcatctgtggtaccaggctggtgtgtacggtttgcaacacgccgatagccagggtgcgcatcgcctggcccttgaagttgcgcaaggcttcgaccgcttgctgcatgccatcaatcagcggcagcgcgtggttatacaaggtatgcgccgccagagtgggcaacaggcgcttgctgctgcgctcgaacaggctgacatcaaggttctgttcaagttggcgaatctgctgcgataaagcgggttgagagatcgacagacgctccgcagcgcgccctacgtggccttcctcatacaccgcgacgaaataacgcagttgcttgaaatccataagacttacttatcgaaaaagctggaaaatcgaaatggccgctggccccttgggcgcctagtctagcgcctattcgcagggcttacagggccggatcaggcaatgaacagcgtttatgttgatggcatttgcataggcaacacaaaaaacctccagtcaggctgtacagggtgggccgaccaaggtccggttgccagtgggggtgaactgtgaatctgtttcgccgacctgcgccgagcctggacgatctggttctcgatgccccgcgtgatgatctttccagtgaatgcctgatgcccacggctgtacggcccccgcaagtttttgtgcgaggcgatggctcttggctttcggacagcgacgaccgtgcctacctggacttcagccaaggcggcggcgccaatagcctcggtcaccgttcacaagcagtgctcagtgccatgaccgagcagatgcacgcagtggttaacccagggggaggcctgtacaaccgggctcaactcaaccttgccgaccgattgtgccacctcaccggcagtgaccaggcgtacctgctcaatagcggcggtgaagcttgcgaagtggcgatcaagctcgcgcgcaaatggggccaattgcatcgcggtggcgcgcaccacatcatcacggccggcggaggctgccatggccacagttttgccgcgatggccgcatcggccggctctggtaacaatcgtttcgagccgcaattgccgggtttcagtcacgtgcccttcaacgacctgccggcgctgcatgctgctgtcgatgcacaaaccgtggcgatcatgctggagccgatccagggcgcagccggcgtgattcctgcgacgcaacactacctcaaaggcgtggagcgcctgtgccgcgaactgggtattttgttaattctcgatgaagtgcaaacaggcatcggccggtgcggctccttgttggtagaagaacagtacggcgtgcgcgccgacatcatcgccctcggcaaaggcctcggcggcggcgtgccactggctgcgctgctggcgcgcggcagggcctgttgctttgaagcgggcgaacttgaaggcacccaccacggcaatgcactgatggcctctgccggtatcgcggtgctggaggcagtgacgcaaaacggttttctccaacaggtacgtgaatccggcctgtgcctgggtgaaggactctcccgcctggcctaccgttacgagcacggtcaattacgcggcaacgggctgatgtggggcctgactttgtcggatgattccgcggatgcggtggtaaaagctgcgctgcatgaaggtcttatcctcaccgccccgcagcccgactgcctgcggttcaccccggcgctcaacgtcagcaaaaaccacatcgacgaaatgctcctgcgcctggctcgcgctttctctcgcgtgcgcaccgcgcaactgcaatgccgcaaaggcattgctgtttaacaccctatttcctgaaccgtctcgcggcatacgcggcgcctccggcctgatttttttggctgggggcgtttttttgtgggtcagttaaaggatggcgcaatgccagattccactgaaccctcaccaaccgccaaggtcgattagcttaacggctcacacgagccgattttctggagctgaccccatggacatcattcgtatcatcatcgccatcctgctgccgccactgggtgtgttcctgcaagtgggcttcgccggcgcgttctggctgaatattctgttgaccctgtgcggttacttccccggcatcatccacgcggtgtacatcatcgccaagcgctgaggccgtcagccttttgcgatgagtcttgagttgcgctcgttgcgaaaggccagttcctcgatggtctgggtggcgtgttcggcttcttcccgtgcctgaaggatgatgccgtgctgctcggacttgctgcacaccgggtcggcgttgctcgcgtcaccggtgagcatgaacgcctggcagcggcagccgccgaagtccttttccttttcatcgcaggaacggcacggctcgggcatccagtcgtagccgcgaaaacggttgaagccaaacgagtcgtaccagatgtgctgcatgctgtggtcgcgcacattgggaaattgcaccggcatctgtcgggcgccatgacagggcagggcggtaccgtctggcgtcactgtcagaaagatgctgccccagccgttcatgcaggctttcgggcgttcctcgtagtagtccggcgtcacgaatatcagtttgcacggatggccttcggcttccagcttggcgcggtattcattggtgatgcgttcggcgcgcaccagttgctcgcgagtcggtaacaaccccacacgattgagttgcgcccagccgtagaactggcaggtggcgagctcgacgaagtccgcttccagcgcaatgcatagttcgatgatgcgatcgatcttgtcgatattgtgccggtgagtgacgaagttcagcaccatcggataaccgtgagccttgaccgcgcgagccatttcgaacttttgcgcgaatgcttttttcgagccggccagcaggttgttcacctgctcatcgctggcctgaaagctgatctggatatggtccagaccggcctttttgaagtcgctgattttctgctcggtcaggccgatgcctgaggtgatcaggttggtgtagaaacccaattggcgtgcttcagcgatcagctcggcaaggtcctgacgcaccagcggctcaccgccggaaaacccaagttgcgccgcccccatctcccgggcttcgcgaaataccttgatccactgctcggtactcaactccttgccctgctcggcgaaatccagcgggttggagcaatacgggcattgcagcgggcagcggtaagtcagctcggcgagcagccacagcggcaggccgatgggcggtttttcaggcaagggtgatccagtgctcagcacgggcgacctccatgaattgctcgatgtcttcaccgagctcgggcacgccgggaaactgcttgtccaactcggcgatgatggcggccacgtcgcgctcaccgtcgatcaagccaccgatcagcgcggcgctgtcattgagcttgatcatgccttcggggtagagcagcacatggcccttttgcgcgggttcgtattggtagcgatagccctggcgccaggtcggttttttgctgcgatcaaagctcataaggtgatccctttatgccagacccgctgctcggtcacgctgtggtaaggcgggcgtttcagttcgtaggccatgctcatggcatcgagcatgctccacaggatgtcgagtttgaactggagaatttccagcatgcgttcctggccttcacgggtggtgtagtgctgcagggtgatcgccaaaccgtgttccacatcgcgccgcgcctggcccaggcgggtgcggaaatattcgtaaccggccgggtcgatccacgggtaatgctgcggccagctgtcgaggcgcgactggtggatctgcggtgcaaacagctcggtcagcgagctgctggcggcttcctgccagcttgcgcgacgggcgaagttcacataggcatcgaccgcaaaccgcacgccaggcaacaccagttcctgggagcgcaactggtcggggtccaagccgacggcctggcccagacgtaaccaggcttcgatgccgccattttcaccgggggcgccgtcgtggtcgagcaggcgctggatccattcgcgacggatttcgcggtccgggcagttggccaggatcgcagcgtctttcaggggaatgttcacctgatagtaaaaacggttggcgacccagccctggatttgctcgcgggtggcgcggccttcatacatcgccacgtggtacgggtgatggatatggtagaaggcgcccttggcacgcagggcggcttcaaattccgtggtggtcagcggcgtgtcagtcatttcgtcagctcctacaattcaatgctcatgccgtcgtaagccacttcgacattgcgccgcaccagttccgctcgctcgggggagtcttcatcgaggatcgggttggtattgttgatgtggataagcaccttgcgctgttcgggcaactgctccagcacttcgagcatgccgccggggccgttctgcgccaggtggcccatctcacgcccggtgcgggtacccacgccacggcgctgcatttcgtcgtcgtcccacattgtgccgtccaccaacaggcagtcgctgccggtcatgatttccagcaacggtgcgtcgaccttgcccaggcccggggcgtagaacagtttgccgccggtgcgcaggtcttcgacgatcaagccgatgttgtcgcccgggtgcgggtcgaagcggtgtggcgagtagggtggcgcggcgctgcgtaatggcagcggggtgaagcgcaggttggggcatgccgggatggtgaagctggcatccagttcgatgcggttccaggccaggccaccgttccagtgagtgagcatggtgaacagcgggaagccggtgctgaggtcttcatggaccatgtcggtgcaccacacctggtgcgggcagccttcgcgcaggctcaggaggccggtggtgtggtcgatctggctgtccatcaggatgatcgcgctgatgccggtatcacgcagggcccggccgggctgcatcggcgcgaagccttgcagttgcgcgcgaatatccggcgacgcattgcacagcacccaattcacaccatcgtcggagatcgcaatggacgactgggtacgcgcttgggcccgcaggctgccgtcgcgaaaacccgcgcagttcacgcagttgcagttccactgcgggaagccaccaccagcggcggaacctagaatctggacaaacatggacgctccatcaggcaaagctcaaaacaaaaacgccccgggcgaaccgaggcgttgtattaccaggcgtatcagcggctggcgaagtacatggtgacttcgaaaccgatgcgcagatcagtgtaagcaggcttggaccaggtcatattcattctcctgtggagggatgggacgttcactactgagtcatacatatagtccacctccagtcggagatgttcagatattgcgtatgaatgttacttaattcttttcaggatagcgctaccctgatggaaaaagcctgttgcagggttggcaacgatcagcctgccgcttgccaggaatccgaggtgcgcgggccattggccacgcagcgccagccgcctgtagcgtggttgagttgctgggcggcgagcaataaatcctcgcgtgtgcgggtctggatgagctgttgaagctgttccagataacccgacggatggccggcccgctgtgcatgccaaagcaaatcggcggtttgggcgagcggcagtgcagtgaattgctgcgccagcgtctcgttgcccaggtcagtgctgctttcgatcagcgacggcagttgcttcagaaaggtttgcaggtgatcgacgattcctgccagggacacgctgggggattgcacgccgaacagcaggccagtttgcccgttgatctgtcggacgccactgaagacggcgtagccgatttgcagctctacacgcaggcgttggtagaacggcccttgaagcaggtgaccgagcaggcgccatacggcctcgtcagccaaagaatgggtgggtgctgggcagaacagcaactgcgcggcttcgctggcgtcagtttttacctcatgccacagatgttggccgttgagggctggcgacaggcgctcaaggggtgccggctgcccgggtaagcgcagcgcagcgcttctgaccgccgcttcgcatggcgaaggtagaccgaacgccattccttgccagcgcgcggtggcccacgacgcaggcgtgccgccgaattcggaatgcgtggcggcacagcaagcgggcagcaccttgagcagttcacgaatagcgattaagggcgttgttgcaggcggcgcgtccagcggctggttcaactgatgcgccagcgcctccagcacggcgggcatgggctcatgcaggccgaccatttttaccagccaatcattggcaatggtttcgaaagaaacgtcgagccccgcctgacgggcgctttcgcgcaatggctgcaaggtgctttccaacccggcgggcacgggcgaatcaaagcgccagtgcaggtacaacgcgccctcttcgttgtcgttcgccaacgcctggctgaagatcagtgctgaggtctccctgcgcccccgtgaacgatcctgcgcaaaggtgcgcaaaccacggtgggcactggtctggccgcgaatcagacctgcgcgttcctcttttgcgggcgggcgaaggaacgggttgttgggtgggagttgccaagtgtgccggggcgcaggcaagtgcagtgaaccgagcatgtccttgaggctggcgatagcgtgttccgacaggtcttcgcgatcattgcgtgccaatgccagcgcgccttgggtgtgttgttggcgtgcggcaagcagggcgaactcttctcgcaatggagtccagtcgctgtgtgcgaaaaagctcagccaatcgtacagaagcgcctcgattcgcgtagccgaatcgcctggagccacgagggtgaagtcgatatccagcacggcttgcccggcgaactggtaaagcacggacgcgtgcagcgcggtggccaacctttgggctttcagttcggcgagcaaaccgccgggcgccgtggcgttgagccaggtacagaggaactccaaggcttcacacggcgcgtcgcaggtgatgacgtgatgcaggtggttgttggctacgtgctgatagctgcgcacttcatcaggcatcaaggcgggcggaacggtttgggggcgcaacggccccgaggtcagttgttcgctgaatgcctgagccagtgtttccagttctgccaacgactgcgggccggcaaggctcagggtcatctgcccgctctgatagaagtgaacgtggaattcccgcaatgcctgctgaaatgtctcacgctcaaccggcaggctgtcccggttcccggcatgaaagccgcgtaaaggatgatccgcagccaagccttgcagcaacgcaacctgttgctgcgccgctgcgtcctgggaccaagcgacgaactccgcgtgcagcacctcgcgctcgcgcaactgatcgtcaatcgtcaggcgtggatgggtcagcatgtcgcccaaacgctccagcccacctttacaactcgccgccggcaactcaaagaaaaagtccgtagtgcgctcgcgggtgctggcattgacctgcccaccgtgacgctgcacgtaggccatcaacccttcgcctgtgggaaaccgctcggtacccaaaaacagcagatgttccagaaaatgcgccaaccccggccacgccaagggtacgtcgtggctgccggcagccacgcgtaaagctgcggcgcagcgcttcaagcgcggcgcatggcgcagggaaacccgcaggccattggccagggtcaggtgaaggtgctgagggtgggccggcgcaggcatgggcacttccgaaacttagaatgtggccatgttaacaaaccggctggctcagggtttatacagcgcgccgtagagctccggccggcggtcttgcaggtagtggttggccgcccgtgcatcaaggatcgactggcgatccagctcgccgacaatcaacgcctcatccaggcccgcctgggcgatacgctggccattcggtgcagcaatgctgctttgcccgcaatactgaatctcgccttcatgcccgcagtagttggcgtaggccacgaagcactggttttcaaaggcgcgcgcccgcacggtgacgtcggccacaaagtcgaacggcaccatattggcggtgggcaccaggatcacttcggcgcctgccaaggctaaacgccgggtgttttccgggaactcgaggtcgtagcaaatcagaaaacccagcgtccagccattgagctccaccagcggcaaatcatcttccccggcgctgaacatcgagtggtccagatcgccgaacagatgactcttgcggtagttgcacaggcgttggccgtgggcgtcgatcaactgcacggcgttgtaaatctgcccgtcctcggcccgctccgggtagccgtacacgatcgccagcccggcgctttttgccaggtcggcaatcacctgcgccgatggcccgtccggcgcttcggccaaggccccgacagcttccgcgccgatgttgtagccggtcagaaacatctccggcagcaccagcacatcggtgccggatgcctcgtgcgccaattgatgcagacgcgcgaggttgccagccacatccagtggcagcggcgggcattggtagagggcgacgcgcatgttcagctccttaatcggccagggcgatgggcccgatttcgtcgaatacgtcacccggccccgggttttccgggtgggtgctgccgccgaagtggttcatgatgccccacaccgcgttcagcgaggtttgcactgcgccttcgacccacgccggggtccaggacacgtcgtcaccggcgatgaaaattccgcgctgttcggcaggcatgtccttttgcatgaagtgcgcatacatgcgctggttgtagcgatagtggccgggcagcgcgcctttgaaggccccgaggaaatgcgggtcggcttcccatgacacggtaatcgggtcaccgatgatgcgcgccttgatgtcgactttcggatagatctttttcagcgcatcgagggccagttttacgcgcttgtcgattggctgcgggagcattttcagcgcgtcgctcatccacgagtacgacaggcaaatcacgccgggcttgtcgtcaccgttgtcgaacaggtaggtaccacgggtcaggcggtcggtgagggtcatgctcatcaggtcgcggccggtttccgggtctttgtctttccagaacgggcggtcgaccataacgaaggttttcgacgactgcatgtagcgcgtgcggtccagggccatccacatcttttgcgagaacagggtttcgtcgcattcgatttgagtggtcagcagccagctttggcaggtggtcaacacggcggcgtattcgcgagtgtcgccgtagttgtcggtcactgcaaaacggccatccggcgcgtgggcgatgcgttttacaccggcgcgcggcgcgccccggtgcagcgagctgaggctggtgcctgcaggccagtgggcgcaacgctccggcacatggcgccaaatgcccatgggtacctgggccacgccgccgaccaccaggtgctggtgatcgtcgcagttggtcatcaccacgcggaagatttccagcatggagttggggaagtccgagtcccagccgccggtgccgaagcccacttggccaaacacctcgcggtgcaggaacgacagcttggcgaacgctttggaggtggcgacgaagtcgtagaacgtgcggtcgtcccacagcggcacgagcttgttccacagttctttcaagcgcggtacatcgcggtcgcggatggcctgctggatatcgccgaactgcgaacccgcctccagagcatcggcccaggcgtcggcgacttcctggaacagcaccggcaagtcagcgagtttttgtgcgtagtgagtctggccttcgaggtcgatcactgtgctcccggaagccggggtcagcgggttcgggaaaggtttggtctcaaggcccagcttgtccacatagtggtagaacgcggtggacgacaccggaaaccgcatgccacccaactcggcgatgatgccctcagcaccttcaaacgcttgagagcgcaagcgaccgcccatcttcgaggcttcatacaccaccggcttgaggcccagcttcatcagctcgtaagcagctaccaggccggcgatacccgcgccgacaatcgccacttcggcgccatggttagcggcgggaatactgcccaagccggccgggtgctcgatccagtcatcaaaggcaaacggaaagtccgggccgaaaatggtgatgggttttttaccgtcggcggggtggcgattggtcttgctgatggtgctggacggaatgctcatggctgaccttactggcgactcgacgggacgcggcccgttgagtataggaaaagatggcagccagtttagggagcgttgcgctcgttattaagacgcaatgtgtcgtcggattggattgtttttagtcaaagtgacgaggagggtggtcaaattggctgaccacgatccaatttgttactgaggatgatcgaggtggtggttttctccacaccggcgacgctgccgatctggtccagcagttgatcaagctgttccggcgaatccgtgcgcagccacgccacgtaatcgaactcgccactcaccgcacacagctgttgaacctgcgccattgcactgagcctgcgcagcacttccttgccggaacgcgcttgcacggtgatcccgacataagcctgcaaaccgccgtcgaccacgcgctgcccgaggcgcacgccgtaaccggtgatcacctgggttttctccaggcgtgccaggcgcgaggtgaccgtggtgcgcgcaatacccaactgccgggcgagcatggccacgctttcgcgagcgttgatctgcagggcggcgatcagttggcggtcgatttcgtcgaggacgggcaaggctcaagctccaacgcgggcggcaatggggctatatgttacagatttgtatcggccagtagcggtcagttatttgtggcatgaaggaatgcgactgcgatgccacaaaatctgacagatgtttgctagtgaagcagattactccgtcgtcatcatgtgttcctttcggagcccgcccatattttggtcgggctttatcactggtgcgtttcgtgagtataaaaaaacatcctatcgaatagcggtgtgtaatatacacacttaaggatggggcgatgaaaagcagagaggtgtttgagctcttggttgcagatggatggtttgaggtggcggtaaagggcagtcatcaccagttcaagcatccgcacaagcgagggcgtgtgaccgtccctcatcccaagtcagagatcgccaagggtactctgcacagtattttaaaatcagcaggcctcaagtgatggcttttactgatgagttgaacggggtctgtgggtcccattcaaaggaggagtaatgaaatttccggtggtagtacacaaagatgcagattcggattacagcgtgacagtccccgatgtaccaggttgcttctcggcaggctcctcattctccgaagcgctggataatgtccgtgaggcgctgtcattgcacctggaagggctggttgccgatgaggaaaagcttcctcaggctcaagaggttgatgcgcatctggacaacccggactatgccggtggtgtctgggcgatcgtcgattttgacctcactccgtacttggggaagtcagtacggttcaatgcctctttgccggagcagctcttgcaccgcattgatgagcgcgtgcaaaaggatcatcgctacgcatcgcggtcaggtttcctggcgacagcggcgttacgtgaattgtctgcttgactccaatgccagacacgcaaaagccgcgcaatgcgcggctttcttgtttggtgggcccagtaggacttgaaccgttatgtggtgcgtgaattgttcgtccggatactgtccgtccggtcttgatcttgtcaatcgtcagtagacactggggaatgctggcgttcattgattgccgtgtcatatttctataaatacaacccgagtgttgtatttatacgactccctatcattccatccttcagagatgggctgagcggacttagggagagattgagcctgtgcggttggctacccctgcagcgtactgagccgatcctagcccctgttgggatggttgttttgactacgcccaccaggcttcatgcggagcgcttttggatcagattcagcagcaattggccatcgggcatgggagacatcgtgcgcaagaagacgacatttttctgtaccgctttcttgatctccgcagccgaaatcggcttatccaagatggtgaaatccatcagtcgctgaaaatggcactcttcgagatagccgtgatgctcacgtttttcagtttcgccagtaccttggccgaaggcgacgatccccttgccattttcgtacaagaagaccacgtcacctttctttatacggtcaatgttgtacttccaaggggcataaaaagctgctgcgctaccctcgctcagcatacggtcatggtcttccaatgagtgacgcttgttcgtattcagaaggtggaagctcgacggttcgagtaactcgatgtctactgccgcctgctctttgtcatcaagcttcagagccgccttggcagcttcaacccccttctctagcagtttcagcattgtctcctggcgactcagatcgagctgatcagccagaccttcgataaatgagtagagctccttgggcatgcggatagatgcggacgccaggtcattcttcgtctttgctgcgttttcgatgagcgaaataatgtcgttcatgggatggatctcctgtcagatgctaagaagcatcccatagcaataaaataaaagcaattattgcttttctataaaagcatacaaagattctcgaaaaatgtaacccagtgctcagcgttcatgcacgcttaaacacgcttaccagtgagccttccatcggacaagtgatcctgggtggggccaaacggcagccaaccgctttctataggtgtatattcatacagtaattcgtatgctatgccctgcgagggacgctaggcataacgctgaaaaggtgcttacatcagtgcttaatgtcatgtcgccaccagcaaggatgaggatttaacttggccactcttacggataaagaaatcgaagccctgaaaatcgagaatttcatttttcacgtggtgcatcatcgagccgatgatccgatcctttttgacgacacccccttaagcaccttcgagccgttcttcattgaccgcatcaaagaaaccctcaagggcaataaattctctttcgctgaaatatctcaagtaaaggccaaattgaatagttgggaaaagggcgagtcgaattttgtcgatatctccaagagcttggcgcggcaatttcatcgccttggtgataaacggatgaagtcaggcgtgttgattgtaattggtttaattacaggggctaaaaagttttattccttaatcaagtacgactctgaaaaagtcgtgacatttgaaactaagggcgcccaggcaatacttcaggcagttactaacaactttactgaatcaccaaaagcgttgcagaaatcagctcttattgatttggattccaaagactcagaagtagtgatcattgataaaatgagccgctcaggaatcagtgatttcttcaaagaattcctgggagtagagcgcctccggaactcaaaggaaatgacggtagatttggttaaggcaatcaaaaaaactgtaaggacacacctgggtgatctgccgcctgctatcacatcgaaggtcgctgagaaagtcgttgagattgcgaaaaagcgtaaagactttgaagtcgacgaattcttcacagatttttttggcatcaatggccaagatgaaatccgagcgacctttgacaaagaattggaaagcctaaatttgactggtgaggtgttctcctatgatgaggaagagctacctaccaatgaggcaaagaaatacgtaacaagtgaaggcataaccatcaatatgcctgcgcgggcaaagggaagcttaactatagaaaatagaaaggatgaaactgttattactattcgtacaagtcgcttgcgtgaatcatgaaacagctagcgctggaacttcgcagcttctttgagcgacttacggcgtcaggtggttctgcgcaggttgaaactacgcatatttttcgaattgatgaagtaagcgttacatcttccgggtttgttcgagaattgaaagatcttgcccagcgtgtttgttctgtgggcatcggaaagatggagctttttggagaagtttccgacagcatcgagatcaaagatttcgatttggaggatgtggaaaatgacagactgacagtcatcttggagaagccaacggatgatgactggtgttatttcctaactttaaaaggtttcgaaaactggttgaggacaaaccaattttcagcacagaactcacagaaaaaaatgtgcgtgtgggttgcaggtgaaacctttgaattttccactcatcagttcctagtgaaagaaatgggtggagataaaaatttaccgaccgccactcaacatcctgaaaaaccttggaaaatggtacgggatcttacccactcccttacccctccgtcgcttgagccatggctgctgactgctgagccaattgctgaaagcgaaccttttacagcctggaaacgcgtggcggtggaaaagctttccttttgcttgccagccgagattcgcaaggaagatgatgaggctcatgtaatatttcgaggcgggcgctcactccccatagctatagaccagcctattaactgggctgatatcaattttgagatgcttcacgacacctgccagtggatctactccacccctagggagtgtgaaacgaaattccaacttttcaacaaccacattgctatcaactggaacagtgggacgacgtggccctctggctcaacgccactcttaaaaaatagcctctcgggggccaaggaagcgttcgcctttcatctccaggatcaaagcaaggaggctgtcaaaagcttaggggatctgcgcaagggtttgcaggacgaggttaataagacacaaactgcgacaagggatttaatatcagctctctggcgtgatttcgcggtggcgggtgttgttttagctctcaagactccgatagcgactgcaggcgtggccgatacagctaccacgattctgtatctcggtgtctctgcacttctcatattgagcatagttatcaacactctatcaaccttgcgttttaacagtcttgctgacagcagtagagaagggtggcggaagaagatctacaactttatgtctgccgaagactggaagcgcttggttgaaaaacctatatcgtccggacgcaccgtttactggctcgcttggactgtgtgtttctgtctatacgcagccattgttcactacttcctatcgcttgcggcacctaactttgtagcgaatcacatcgattattattttttctgcgcctggaactacatcgccgcttttttttagtaaaactataaatgcacctacggttgaatctttatggtgcagtattactgcgcggatatttagaagctatgccaggaaccattaggggcttgcttccaaatcagaagatagtctgggtgaggtagggggctatagccatcattgtccgcattcctttgctcagcgtaatgtacccaaatagggtcattaagcctaaaaatggtggttaatgtgccgtattagggacattagcctggctcgtcacaagggacatatccgtagcactcggcgtccagacggcggttaacactcttagtcgctaggctcgtgacgagcccagcgcaatctagctatcgacatgaattgcctaattgccaacgcgccacgttcatttctggctttcgaacctggcaaggttagagctgcctcgaccatggcacgactcgcttcgtacattgcaaatgcgttgaactcagaatcaagcagcaccaagagcactgtatcgaagggttgtcgtagatcaattgcacccatacggcccgtaatcttttgcgggttcaggatacatcgccccttgatctggattctcgcgacgccatcttccagcgtctctgtggcgtcgtaacctgcctgccttgcaggatgtagtaacaggccgagtctagtagcagcttcgtactctgcgatctcgcctgtcacgcccagcggcttgccggtcaggcgatagaatctacgcgcgagcaccttggcctctttcaagatctctaggatttcatcctggatcaatgcagcctgctgaggttcgttgccatgactgagttcagtcatctgcaaacgcctcgagcgcagtgagcagcttggcaagctcagtcaggttggctgcagtcacgatgtcatattctcctcgactactcagccgatacacctctcgagcctttttgacacgttccagcagagggacgactatgcctgacgccctttccagaaactcgttgatgtcagcccgtgtctgaggaattttgtagcctttggccgcacttgtgataatcacgtccgaatcgcgaagcttggcgatgccgctggagcggatcctctggtcgttgatatctccgaagccgctatcttttaggtggccgactatttctgcggttggcacgtagtctttggtgacgaattcgctttggaatctcaggaaccgcaagatgctcagctgcaggcgctcatcctcattagggtgctcaccagccctttcgctaaaaaggtcagcctggcggagagcttcttggtgtacctggtagtctgcatacccagattcatccgccggcggcggcagaagagactggtacttggatggccactcaagcattccaagggtcaggcttcgtagaatctttttgtaggcaagaactgcttcttccgatgctttctcttcgtagatctgagcgactgagccagcaaaaaaatctgcaacctgaaccaagacgttgtccttactggccatcgtctggaacgcatccttatcgccaaataggtcgtccacgaatcgttctgcaacgtagcttttgaggctctcctgaaagtcctggccaccatgctcgtcaacgatcatctggaggtcagggtatgcgcggaacaagcgttcatagagcaacccgttcacgtattttatgaacgaggtcttgatacggaggccgccgtctttgtgaattcgggacttatcaacgacggtgaaatagagcttgaaaggcagctcagctagctcgttgaggattcgggcacggcgatctgaatccttcggcttcagattgctggatttgatctcgcctgtttgaaagtgacgcatgcggagtgcttcagcttgggcataagcagcttccaggtctttctctgccaccagaatggagcacacgatgaagaagcccgagcttcctccctttgacgtatcaaggtcggaattcccggactcatccacgaaggcatatgttctgtccatgagcttgctccatcaacaacgtactgagcgcggtgggtcgcccaatggcaaggtggcgaacttagttcgtcgcagtggtagtgcctggagcggggccttcgctgaacgtgtagttgatgaccacgtcattacggatcaaaacgtcgagagttttctgagtgcccgtagtcgtcaccttcatggtgaccacgtagctttgggcatgggctgagccattggtgtaggtgtagatccacttctcgtccgtctcgctgactgcgctcttagcgtagggctcaccaaatagcgacttcaactcagcagtcgtggtcttacctttggtgatgctcgctacactggccgacggaaagtctcgtcctgcggtgtagtgcgacgtagcgcaaccgccaagtgcgacacacatccccatgactgcgatgagctttttcatatccatccttgatcgtagaaagctccaaatctagctggcatcgaggctaaaagccatcaccaaggtgatcagctactttcgtgcattcgcagataatgctttgcacatgtagcaagccgagccagggcaaagccccctgaactgctccgtctgagaaataagaggtggcgcagagcctcgttgatttactgcatagccctgctgcttaaaaaagcctgaagcagttgttgtcagcaaatgaaatcgagcgattccctgctcggcggctttcgtttcaatgacccgaagcaccgcgacaccgacccccttcgatctgaatgtcgacactacgaccagagaacgcaacaacccgtccgtaccatgcgtttcgaatcctccccatgcgaccgtttcactgtccagtgtgaactcaaaaaaggttcggcctggaagatcaatatcgtctgctggaaggtcagcaaatttcagcgcatcgcgaaagcgctgcgactgccctccggctatttccgttccctggatcatcatatccccctccatcttctcatctccgttatgccgacacgcatggaacgttagggcacatgccgaaacagcagacatcatattcgctttaccgaatattcgccaaagcgtatattcgattttccatatgcatcgagttccaccatgagccctgctatcaaagtgcttttcgtgtgcgttgccaactcggcccgctccctgcttgcagaggctttgctgcggcacaccgacccgcgcttcgaggccttcagcgcaggatctgaaccgtctgaggttgatctgcgcacgactcaagcattggaggcagttggagtcgatgcaacgggcctgcgcagcaagtccatcagcgagtttcaagctggccgattcgattacgtaatcactctttgtgataaatccgcaagcgagtgcctaccaatacccaatgcaggtgaagtcattgcctgggattttcctgacccagtaactagcgatgatcctggcgcatttcgccacacgctccacgacatccacgagcgcatcaagctcttcgttttggtcaagaccaaacacctggaggatctatgacagaacccttgaaccccaccaccttattcaagtgcctggcggatgacacccgagccaaaatttccctgcttgtcgtgagtgaaggtgagctgtgtgtatgcgagctgacggcagcacttgacctgagtcagccgaagatttctcgtcatttggcgctgctgcgctccgccggtttgctgttggatcgtcgccaaggccaatgggtgtactaccgactgaatcctgatttgcccgcgtgggtgactgcagttttgaaggaagtagtagacgccaatcagcaatggctggaaaccgaggctaagcgcctctgcgccatgaacgaccgtccgatcaaccaagccgtgtgtagctgattcacgcccaaccggattaatgaaatgctgattgccgtattgatctttatcgccaccatcgtccttgtcatctggcagcccaaggggcttggggttggctggagtgcgatgttcggtgccatcgtggcgttgctggcaggtgtcgttacccttgccgacataccagaggtttggcgcattgtctggaatgccactgggactttcatcgcggtcatcatcattagtctgctgcttgatgaggcaggttttttcaagtgggctgcgctgcatgtggcccgatggggaggcgggagcacccgcaagctgttcgcatttatcgtcctgctgggcgcagctgtgtcggccctgttcgccaatgacggagcagcattgatcctcacacccattgtgatcgcgatgttgctggcgttgcgtttttctcctgctgctacgttggcattcgtcatggcagccggttttatcgcggatacggcgagcttaccgctggtggtttccaacctggtcaacatcgtctctgccgactacttcgatatcggcttcaacgaatatgcctcgatcatggtgccggtaaacatcgtcagcgtggcggcgacattagccatgttgctgtggtttttccgcaaagatttaccaaagacctatgacctcaaccaactggacaatccggacgaagcaatccacgaccgggccacttttgtagccggctggtgggtgttggcactactcctgatcggcttctttgtcattgagccattgggggtgccaatcagcgccattgcagcggtctgtgcattcattctttacgtcatcgcggctcgtggtcacgccatcaatacaagcaaggtgctcaaagaggcgccatggcaggtggtgattttttctttgggtatgtacctggttgtttatggcctgaagaacgccggtctgaccgaccacatcgcgcagatcctgaacgtgttcgccggttatggcgtttggggcgcgtcccttggtacagggctgctaacagcgttgctgtcttcgatcatgaacaacatgcccaccgttttggtaggcgccttatccattcatgccgccgaagtcgatggtgttgtccagcaagcgatggtttacgccaacatcatcggctgcgacctgggcccgaagatcaccccaattgggagcttggcaactctgttgtggctgcacgtgctcgcccggaaaaatataacgatcagctggggttactacttcaagaccgggatcgtgctgaccgtgcccatcctcgtcgccacattgtccgccctggcactgcgcctcagtttttgaatcaaggaatcgtctgatgaaagtcttgttcatgtgcacccacaacagctgccgcagcattctgtccgaagcgcttttcaaccacttggcgtccgagggtgtagaagccgtcagctcaggaagctttcccagtggcagggtgaatcaacgggcattgcaaacgctggaggcggcgggtatctccacggcgggcttgagcagcaaggcttcggatgcttttgaagcctcacctccagacatcgtgatcactgtctgtgaccgggcagcgggtgaggcatgcccaatcttctttgggccagctttgaaggcgcattggggtctggccgacccgtctgacgctagcggttcggaagccgagatcaccgcagcttttgaaaccacactcgccaaaattcacgagcgcgtgagcgcatttcttgcgctgccactgaagaccatcagcgctgaacagttgaaagctgaactgaaccgcatcggttcgctttaaagatcaaccgaggcggtgcccaacctggcgccgccgtaggagtttttatgcaagacacattgccgaacgtacacgccgacctgatcgacattccttcgctggagcaactgtcgcctcgtacgccttcgctccataaacctcgcattcttctgctgtatggatcaacgcgagagcgctcattcagccggttagtcacgcaagaggctgcacgcctgctgaatgagtttggtgctgaaaccaagatctttgacccatcgggtctgccgcttccggatgacgctcccgatacacatcccaaggtcgctgagctgcgcgagctgatgcaatggtctgagggacaggtgtggtgctcccctgagcgtcacggctccatgagcgcagtattcaaagcccaaattgactgggttccgctggcgattggcgctgtacgacctacgcaaggcaaaacccttgctgtgatgcaggtctgcggcggctcgcaatctttcaacgtggtcaatcagctgcgcgtactgggtcgatggatgcgaatgttcaccatcccaaaccaatcttcggtggccaaggcatttaccgagttcgacgagacaggtcgtatgaagccgtcctcgtactacgaccgtctcgtggacgtgatggaagagctgatgaagttcaccctgctgttgcgggatcgccaggattatttggttgatcggtactccgagcgtaaagagtccgccgaagagctttccaaacgcgtcaaccagcgctccatctaacgtcagtacgaggaagcgatatgagccagatcacgatctaccacaaccccgaatgcggcacctctcgcaacaccttggagttgatccgtaacagcggggaagaaccgacggttatcgagtacctgaagaacccgcctgatcgcaccacacttgtcagactcattgaggatatgggtatcggggtgcgggctcttttgcgtatcaaaggcactccgtacgaagagctgggattgggcggtgcatcgctgacggacgaacacctcatcgatgcaatgatggctcaccctatcctgatcaatcgccccatcgtcgtgacgcctttggggacgcgtttgtgtcgtccgtcagaagcagttctcgatttgttaccgcaagagcagcgtggcagcttcatcaaagaagacggacaagtcgtcattgatgagcacggtcgcagagtctgatacgacgacggtgaggtgccgcgattgagcctggaggatgctggtgagtcagaattcgaaacttgatgttgtggtcattggcggtggtcaatcagcgctgacagtcgcctattttttgaagcggtcaggcttgtcttacgtgctgctcgatgcggagtcggcaccaggaggagcctggcggcatggctgggattcgctgcgactcttctctccatcggcatggagctcgattgcgggctggccgatgcctgccgtatcagaagaaacgcctcaccgtgatgatgttatcgactatctgaccctgtacgagcgtcgatacgacttccccatcatccgatccaccaaggtgacccgtgtcgaaaaaatcgaagaagggttacgggttgtctccggggatagatactgggatgccaaggcggttatcagtgcaacaggcacctggagccgcccatttaccccgagctatgccggacaggagttgttcgtaggggagcagcttcattccgctcattacgttgggccgaatgagtttgagggtaaaaccgtccttgtcgtgggtggtggcaactcgggagcacagatttacgccgaggtttctaaagtggctcaggcaacctgggtgactcaagaggccccaaagtttctacctgatgaggttgatgggcgtgtcctgttcgaacgagctactgctcgattgaaggcgcaacaggatggcgtggagcctgaaaaacccgttggagggctgggcgacatcgtaatggtgccatcggtgaaggacgctcgtgaacgcggtgtattgagcgctgtacggccattcacgcacttcacttcaacaggcgttgtctggtcatcaggagacgaaacagcggtggatgtcgtcatctggtgcactgggttttctccagcgctcgaccacctgaacagcctgggcattgtaggccaggatggcaaagtggctgtgaacgaaaaccggagtgttgcttcacccaatctgtggctggtgggttacggcgattggacggggctcgcctctgcgacattgatgggagtaacccgcaccgctcgagatgtagtcaagcaagtgcaaagctatctcgctgagttggactgatgtctaccgcagccccgacgacaaggcagcatgcgaccctgattggctcaatggattgtaaccaaattcttgcgtggggctccacgttttatctgctcatggccgggatattgggcatcggcgctttggtcgcattcaccaaactacgagccttcaccccatcactggcttgatttcaacctgggggaagagaataggttccagtggaggagttgcctggcacagcccgagccgccaatagccgacgtcgtgccatttcccaagcttgaagcctacctctggatacgtccctatatgggtgaatcctagcgactcgtgcaggcccacgctgccttcattgggctgcgcaatgccagcgtaagcggcgcgaaaccgctgtttctcaagtattggaagtagagtctcgtagagttcgcgcccaacaccctggcggcgagctgattcagctatgtacaccgtcacgtcaacagcccatcggtaggctgcacgtgcacgatgctggcttgcgtatgcatagcccttgatctcaccaccttcttcagccacaaggtagggatatgtttgaagtgtcgtcgctatccgctgagcaatttcatcaacactcggcgggatctcttcgaatgagatcgccgtgttcgaaactatgggggcataaatgcgctggatggcttctgcatctgctactgctgctgtacggattttcaaagccatgtaggtcgtccctgattcgaaagttgaacattaccctttttggatcagacttggacatggtcgaaatatgaagatgtcgtggggggctacctatccatcgtactgatcattggtattgatgtgcacgtcggcttccatggctggataggcctgaacgcataaggcgacttctgagtgttccaactcaccagctactgtggtcttttcctaatggtattcggtgccgccaatgcagtcttaggccgaactggccgggattttgccctctgaccggtacgttgtttctgcgctatcagcgttcgccacatttggcaatgtgcttggctctgcactgaactgggtgctaggtcgttacgttgaaagattccgccacaagcagcggttttccctagcccggctaacgacgaatagacattgactcgataatgcggcactgctcaatcacgccgccctcgcaacaagcaatcaagcgctccagttccgcctccaaaccttgtaggtctcggatgcgcattcgcacctgctctaactgcccttcgatttttgcgtcaaccatggcgcaggaagcgtcgcgattatcagcaaaacctagcaactctcgaacatcgtcaaggctgaagcccagtgcgcggctgcggcggatgaacaatagacggtcgcgctcctcgttggtgtagaaacgatagcctgatgctgaacgtcctgcggaaggcaataggccgacctgctcgtaatagcggatggtcaccgctttggtatcagtcgccttcgccagatcaccgactgtgtacttggtcgaactcatttcgcttgaccttatagttgctagaaccttcattctacccgccttaggcgaaatgcaaatctgcgcgcgcaacagaaaaacggactgaattcctatggacgcccccatacaacaaaatcaatccggagcttgggcactgctgctatgtgcctggttgcttgctctggtatcaacaatcgcagtgctattcgttggtgaggtcatggggcaactaccctgtgtgctttgttggtttcaacgcgccttcatgtttccactcgtccttgtgttgggcgtcgcctgctgtttatcggataccggtgtttggcgctatgcactgccattagcagttatgggctggttgatcgctctgtatcacaacctgctttatttcggattgatccccgaaagcattaaaccctgtggtgccggcccatcctgctctggcgatgatatgaccatcctcgctggcgtgccgttgcctttgttatcgctgggtgtattcagcctcctgatcattcttcttgttcttatccgccggagattcaaccaatgagccgacgcacactcgtcctcgccatcagtgtcctggccgtcatcggctttgcggtcgctgcatttttttatgatcgagcctccacggtgcctcaagccactacccccgtgcaggaagtcggcgcgctggtgcgtttcaattcgccaagctttggcccggccaaggcaccggtcaccattgtcgagttcttcgacccgtcgtgtgagagctgccgcgccttttatcccatcgtgaaaaaaatgatgtcccagcacccggcagatgttcgcctggtgctgcgttatgttcgtcttcacgtcggttctgaagaggccatccgcattctcgaaactgcgcgcaaacagggtgtgtttgtaccggtacttgaagctgtacttgaggctcagccgcaatggcatgacgacgcaaaggctacagcggcttgggacgcagcgggtcaggcaggcctggacgtggccaaggctcgcgaggacatgatgtctgctgagatcacggcgaccatagaacgagacgctgccgatgcgaaaaaggttggcgtcagcgggacaccgaccttcttcgttaacggtaaaccgctcaccaacttcggtgcccagcagctctacgacttgatctggagcgagatcaaccagtcgcgataaacacgattcgcaatgctgaaaacgggtcaacgatcttcatgatttgcttgaccctatagtagctatagggtgttcactgttcgccatatcctgctgggagtgcctcatgaaaagctgttgcggtgacaaacaaacacctgaaacacagactgtcgtcgaagtgtttgatccatccgcaagctcgggttgctgcgcccctgctgcaacgatctgcgattcaagcgtggcgaaagctgagtcggctgacagctgttgtgccccgaaagccgcaaacatgaatccagaacccttcaatgcagaaggcgcgggttgctgcgctgctacagctgcgccgtccatcctgtacaacttggctgaaccgagcaaacctaccgctgcggtcgacgacgctctttttaccgaagtgatcagccttcagtcatcttcaccagaagctcttcaaacgggtgccagcgacggcgcacgcttcagcagtttccgcatcggacagatgtgctgtccctccgagcaaaccatgattgagggcaagctcgctcgaatgagcgggatacaaagactcgaattcaacatgatgaaccgcacactgggtgtgtggcacgagttgccggataccttgggtatcgaagcagcggtgctgtcgctgggcatgcacgcggagccattgacggctaggagcaaatcgcctgacgtcaatgcagggcaaaccgagttacaagctaaccccgtgcctaaaagtagttggtggccgttggcgctgtccggtgttgctgcggcgggcgcggaagtcctgcattacacccaggcggcaccggaatggatggttgccgtcgtggccttgcttgccatcgccctctgtgggccgaagacctataagaaaggttggattgcactcaagcatctaaatctgaatatcaatgcgttgatgagtattgcagtgactggcgccgtgttgatcggccagtggccagaagcggcgatggtcatggtgttgttcaccatcgcggaaatggtcgaggcaaagtcgctggatcgtgcacgtaacgccatcaaggggttgctggatctgactccggaacgcgccactgtccgccaatccgacggttcctggttggacgtcgatgtgaagacggtcaggatcggagcgctggttcgggtgcgtcctggtgagcgcatcggtttggatggtgacgtcgcttccggcacgtctactgtcaaccaggcgcccatcaccggtgagagcctgcccatcgagaagtcggttgatgatcctgtgtatgccggatccattaatgaatcgggctccttcgagtaccgtgtaaccgccgaggcccacaatacgacgctggcccgaatcattcacgccgttgaagaggcccaaagttcgcgggcacccacccagcgattcgtagataagtttgccaagatttacacgccaggggttttcttcttcgccttggccattgcggtgttgccacccttgctcatgggggggttatggactgactggatatatcgcgctttggtgcttctagttgttgcttgcccctgtgcactggtcatttccacgccggtatccatcgtcagcgggctggcggcagcggctcgcaaaggcattttggttaagggcggtgtctatctggagattggcgccaagctgagctttgtcgcgctggataaaaccggaaccatcacccacggcaagccggttcaaaccgactacctgcccctggccgagacttcagatgtagcgcctcaattgctcgccgccagtctgggggctcgctcggatcacccggtctcacagtcaatcgcgaggcatgagggactgggagccacaatgctgaaacaggtcgagagcttcgaggccattcccggtcgtggggtgaagggcttgatcgatggaaagctttattacctgggaaaccaccgtttgatcgcagagctggggctgggtacgccagagctggacacgtctctgagccgattggagcgtcagggaaaaacggtcgtggcgttgaccagctccacgcaagcatttgctctgtttgccgtggccgatactgtaaaggattcaagccagctcgcgatcaaggaactgcacgagttaggcatcaagaccatgatgctgaccggtgacaacgcgcacacggctgaagccattgcccagcgagttggcattgatgagccgcgaggcaacttgctgcctgccgacaagctggcggccatcgctgagttgcaaagccgcaaccacgtggtggggatggtgggtgatggaataaacgatgcgccggctctcgccaagtcccagattggcttcgccatggctgcggctggtacgggaaccgccatcgaaacggctgacgttgcgttgatggatgatgatctgcgcaagatcccggcctttgttcgcctgtcacggcagaccgcgctgattctcaaacaaaatatcgtgttcgccctcggcatcaaggccgtattcctggtgttcaccttgatgggggtcgccaccatgtggatggcggtgtttgcagatgtcggcgtcagcctcctggtagtgctcaatgggctgcgcttgctgaaaaaatagtccggagattcagcatgaaagagttgttgcatcgtgcaattcttgagggcttaggcgaagcacgtatcgcaattcggtgtcgagattttgagagcgcctactattggctggagcgtacccacatcctggcgcagcgccatccgctgctacatgcgaaatctcatgtcttgatgttgttcgtgggcatcagagcacaagacccccgggaggtttttggacaaataccacgtgttattgctgcactgctattttctagattatgggtgcctcgtgggaacaccggtcgcgcccgaatcaacgcttttcaggtgatgcctctctctccggaactagaatctcttcttgacgaagagtgacccgcagacagttctctgagccactacatccttacatttacatggagagtcatatgggcgctggtcatagtcacggtcaagctcgtgcaggacacgagaaaaagttgtggattgctctggcgttaacgacaagcttcatgatcgcggaagtcattggggctttcgttaccggcagcttggcgttgttatccgatgcggctcacatgctgaccgattgcactgccctggctatttcattgatcgctattcaaatcgccaaacgcgctgcagataaaaaacggacattcggctacgcacgatttgagatcctcgcagctgcttttaacgcgattctgttgtttatggtggcggtgtacatcttgtacgaggcttatcagcggtttaaaaccccgacagaaatccaatcgacaggcatgctgatcgtcgcggtgatagggctcgttgtgaaccttgtttcaatgcggttgcttatgtctgccagtgccgaaagccttaacgtaaaaggcgcgtacctagaagtctggagcgacatgttgggctccataggcgtaataggggcagcattgatcattcgttttaccggattgacttgggttgactcggtcgttgccgcagccatcggcctgtgggtgcttcccagaacgtgggttttgctcaaagaaagcatgaacatccttttgcaaggggttccggatggaatcgatatcgctgaagtggaggcgagcatcagggcggttgaaggcgttgaggatatccatgatctgcatatctgggccctgactagcggcaagaatgtcatgagtgctcaccttgttatccagcgttcatcccgtggcgagcaggacatattggctgaggtgacgcgactgatgagcgaggtattccatatcagccatacaactcttcaattagaaaactcgcagtttcatgaagagctcgaagaaaacgaaggcatgcagcactagagcgggatctggtgaagatcccatgtcggggtgggatctgctgcgatgttctcagaactcaacgaacataaaccctgtccaccggagcaactccagtggtgcaaagaaggggcgagttatacaagcctgttgcgggaatttatctatacgtaatgctggcttaattccttttcggcttcattgccgccatggcctgttgacgacaggttaatgatgacatgtccaattgtaagagcccatttcagccactacactccagcccatgaaacgctacctgcggctttgcctcattttcgtgattagcttggcgcttccccttagcgggatggcgggtgttcaggcgccgacagaaccttgcccaatgaagacgatgggcatggcgatgatggacgacatgggaatggactgctgtaacgacatgaaaagcccgacggagcatggcaaaccgtgcaagacgggccaggaatgcaagacgggcggcatgctgcaagtttcgatcctcaagcctcctgtaagcgtattcagccccgtagtggtttccttcttcagcgattccctgcccgtacaaaccccatccggggtatggcgaccgcctcgcgtttgattcctgtccaacattgagcctcattccgcattagcgggatggactggctgcgcgcatttcaatttgacgcgtgcagtggatgatcacaggaatcgtaaacatgaaatccaagtgctattgcacaggttggcccctcgtggtcggtctggcggcaagcgtactggcattgccgagcttcgctgccgcattgacactcgatgaagcgttgcggctggcagaaaacaatgcgccgtcgctgaccgcacaagacgccaaaattcaggctgccagcagtgcagccatccctgctggtgaattacctgatcccaagctcttggtgggcgtgcagaactaccccatcggcggcccggatcgttggagtatcgaccaggacttcatgaccatgcagatggtcggggtcaggcaggagatgcccagtagcgacaagcgcaaagcgcgtatcgaagtcgccaatgcagctattgatcgtgcctctgcggagcgtcgagtcgaacgtctgaaggtgcgccagtccacggcgttggcctggatcagcagctactcggttgagcgcaaagatgtgttgttccaggatttctacaaagaaaaccgcctgctgagcgataccgtccgggcccaaattgccggtggccgcgctcaacccgccgatgcggtgacacccaagcaggaagcagctcaactggcggagcagcaggacgatctgattctccagagagcgcaggctcgtgcggccctcaaacgctggattggctccgccgccaacgacaagcctgtgggcagcttgcctgaatggcccgtcgacaactcaagttactctcataagctgcaacaccaccccgagttggcagcgtttgcgccgatgacccgcgaagcgcaagccaaagttcgtgaagctgaagcggaaaagcagtcggactggagttgggagcttgattatcagcatcgtgaccgtcagttcggcgacatggtcagcgttcaactttcctgggatttaccgctatttcccgactctcgccaaaaccctaggattgcggccaagcaggctgaactcaaccaattggaggccgagcgcgaagcgctgtcacgcgagcatacccagcagctggaaaatgaactggctgactatgagcgtctggatcgtgccgtgcgcagaaatcaggacagcctggtgccgctggccaaggaaaaggtcgaactcagcatggccagttaccgtgcaggcaagggcgatttaaacgcggtggttgccgcccgacgtgaactcatcgaagcccgcctcaaacagatcgacgtagaagagcagcgagcgctgaccagtgcgcgtctgtacttcgcttatggggagtccagccaatgatccttaaaaaatggaacggggcattgttggtaggcgtctcgctggcattcggtattgccggtggttactggttcgcacatcaacgcgtgagcggagtacctggtgccagttcggagcagagtcccagctcatcagaggaacgcaaggctctgtattggtacgaccccatgtacccgcagcaaaagttcgataagccgggtaaatccccttttatggacatgcaactggttcctcagtacgccggtggcgcaggagatcctgcgaccgtcagtatcgatccgagtctgactcaaaatctcggtctgcgttttgcgacagtcacccgtggaatctttaactccagtctcgacgtcacaggagtaatgggattcaacgagcgtgatgtcgctgtgattcaggcccgcaccactggctttgtggagcgggtctatgcacatgctcccggcgatgtactcaaagccaacgcggcgttggcggatatcttggttccagagtgggcggcggctcagacagagttccttgctctcaagcgcagcggagatgctgagttgctagcggcggctcgtcagcggctgcgactcacagggatgccggctgcattgatatcccaggtagagcacagtgggatagtccagccgaacctgaagctaaccacccccatcagcggcgttctgcaagagctaaatgtgcgagcgggtatgaccgtgacgactggcgagaccctggctcgcgtcaatggtttggacacggtctggctagctgtagccgttccagagtcagataccggagctatcactgttgggcagacagtggaagcgcgtctgccagccttcccaggaacaacactcagtggcatggtcagcgcgatcttgcccgagaccaatccggacagccgcacacttcgggtacgtgtcgagttacccaatccggacgggcgtctcaggccgggtttgacggcgcaagtacgcctgaatcgttcgaccgagcaaagtgtattgtgggtgccgagtgaggcggtgattcgcactggccgacgagcgctggtgatgctcgccgaagacgctggccgctaccgccccgtggaggtgctccttgggcaggaaagcgatggcaaaactgcgatagtgaaaggtctggaagcaggccagaaggtggttacatctggccagttcctgctcgactcggaggccagtcttaaaggcattgttgctcgcacggatgaagagtcggcacccagtgaaacagcctccagttttcatgaggctgatggtcagatcgttgagatcaacgacaaagaagtcacgctcgcccacggccctttcaagacgctgggtatgcctggcatgacgatgactttccctctcgctagtccggcgctgatgcagggcctcaagtctggtgacaaggttcgggtcgcggtgagccagaccgatgatggcttgcgtgttgaacgcctggataaatcggggggccagccatgattgctgccctgattcgttggtcagtggccaaccgattcctagtgctactcgcgacactgtttgtcaccgcttggggtatctggtcggtgcaaagcacgcccattgatgcgttgccagacctctccgatgtacaggtgattatccgcaccccttatgcaggacaagcgccgcagatcgtcgagaaccaggtcacctatccgttggccactaccatgctctcggtgccgggggccaagaccgtgcgtggttattccttctttggcgatagttttgtctacgtgctgttcgaagacggcactgacttgtattgggctcgctcgcgggtgttggagtacctgagtcagatacaaagccgcttgccggccagcgccaaaccggcgttggggccggatgcgacgggggtgggttggatctatcagtacgcactggtggatcgcagtggcgggcacgatttggcacaacttcgcgctcttcaggactggttcctcaagtttgaactcaagaccctaccgaacgttgcggaagtggccaccgtgggaggcatggttaagcaataccaggtgcagcttgatccgctcaaactggccagcctcggcatcactcagtctgaggtgaccgatgctatcggcaaggccaatcaggaaaccggtggtgcggtgctggagatggcagagaccgagttcatcgtgcgtgcttccggctacttaaagacactcaatgactttcgggcgatcccactgaagctgggctcgggcggtgtgccggtgactcttggcgatgtcgccacgatccagctggggccggaaatgcggcgtggcatcaccgaactcgacggtgagggcgagaccgtcggcggcgtggtgattttgcgcagcggcaagaatgctcgcgaggccattgctgcggtcaagaccaaactcgacgagctgaaaaaaagtttgccgtctggggtggaaatcgtcaccacctacgaccgcagtaagctgatcgaccgcgctgtggaaaatctcagccacaagctcatcgaagagttcatcgttgtcgcgttggtttgtgggatcttcctctggcacttacgctcgtcgctggtggcgatcatctccctgccggtgggaattttgattgccttcatcgtcatgcgctaccaaggcatcaacgccaacatcatgtccttgggtgggattgccatcgccatcggcgccatggtggatgctgccgtggtaatgatcgagaacgcccacaagaaggttgaggcgtggcatgtagcaaacccaggggaagaactgcatggggagcgtcattggcacgtgatgaccgaagcggcggcagaggtcggcccagcgctgttcttctgtttgttgataatcaccctttcgttcattcctgtgttcaccctagaagctcaggaagggcgtttgttcggcccactggctttcaccaagacctacgccatggccgcagcggcgggattgtcagtgaccttggtgccagtgctgatgggttactggattcgaggacgaatccccagtgagcaacagaacccgttgagccggtggttgattcggatctatcagccagctctggacgcggtcttgcgtcgaccaaagatcacgctgctggtggcgctattggttttcgtcagcgcgctatggccaatgtcgcgcttgggtggagaatttcttccgccgttggatgagggcgacctgctatatatgccttctgctctgccgggattgtcggcgcagaaagcggcgcagttgctgcaacagaccgaccgcctgatcaggagcgttccagaggttgaacacgtcttcggtaaagcaggccgtgccgaaaccgctaccgacccggcaccgctggagatgttcgaaactactatccagttcaagccacacgagcaatggcgcccaggcatgacccaggagaaactggtggaggaactggatcgagtggtacgagttccagggttgaccaatatctggataccgccgattcgcaaccgtatcgacatgctggccaccgggatcaaaagccccatcggagtaaaggttgccggcacaaacctgactgagatcgatgccgcaactcaggcggtcgagcgggtggccaaggatgtgcccggtgtcagctcggctctggccgagcgactgaccggtggccgctatatcgatatagatatcgaccgcaaggccgccgcccgttacggacttaatatcgctgatgtgcagtccattgtggctggtgctatcggcggtgaaaacgtcggggagaccattgaggggcttgcacgcttcccgataaacgtccgttaccctcgtgagtggcgagactcgctcggcgccttggagcagttgccaatctacaccccgctaggcacccagatcacccttggtacggtggcgaagatcaaggtcagcgaagggccgccgatgctcaagagcgagaacgcacggccttcaggctgggtgtacatcgatgtgcgtggtcgagacattgcctcggtggtcgccgatctacgccgggtcgtcaatgagcagatcaagttgcagcccggtatgagtctgagttactcagggcagttcgaatttctggaacgggccaacgcacgactcaagttggtggtgcctgccaccctgttgatcatcttcgtgctgctctacctgactttcgcccgcttcgatgaggccttactgatcatggctactctgccgttcgcactaacgggcggagcatggttcctctatctgctgggatttaacctgtcggtcgccaccggagtcggctttatcgccttggccggggtttctgccgagttcggtgtgattatgctgctctacctgaaaaacgcctgggccgagcgtgaagacctcggcgacagcactgagcgcgggctggtggcggcgattcgtgaaggcgctgtgcagcgcgttcgacccaaggccatgaccgtggcagtgatcattgccggtctgttacccatcctgctgggcagcggcaccggcagcgaagtcatgagccgcattgccgcacccatggtcggcggcatggtcacggcacccttgctgtccctgtttgtcattccggcagcgtatcgcctgatgcgtcgccgtcacctccaagttgaacccaaccccgctcaaggaaaagtcgtatgaaactgaccctgattgcagttgctagcaccgtagttacgatgtctttttctgccctggcagaggacataccgggcatgaaaatggacggtatggagggcatgcagatgaagcaagaaacagagcaggctccagtagccaccgccgacggaacgatcaaggctatcgatactacgaagcatacggtgaccattgcccatggcgctgttccatcagtgcaatggccaccgatgactatggctttttccgcgacagaggatcagttgacagggctggcagccggagatcgcgtctcgttttcctttcgcctagagggtggcaaagccacaattgtttctataaggaaatgagcctgcggtgataaaaaaccggcacggttcatcgtgtcggttttcttcccctggaacaatgggggcataaatgcgctggatggctgctgcatcttctgtcaccgccgtacggattttcaatgccatgcacgtcgtccctgattcaaaaactgcacattactttttgggtagctttgagacactaaggctttttcgctatgaccagtagccctgcaacgatcaggcctgctccggcaatcatgcgcagcgtgatgacctcccgaagcaccaggccggcgagcaacatagcaacgaccacgctacctttatctatcagtgccaccgtggcgacatcccctaccttcagagccttgtagtaaaagatccacgacaaggcagtggtcactccagacaagccaagccaagacagattccggctcgtgatgttggccacttcttgcgtcggaacggcccatgccgcgaataagagtacaaaagcacacacgaacaaggtacggattgccagaccaagctcgcctgaaatacctgcgaggcccatcttggcgatcacagacgtgaacccggcaaaaaacattgagatgaaggcataagccatccatttttccatgcgtgtgttccccaggacatttgatgttccgaacgactgagaggccaatcacaagtcacttgcccctcagtacctactcccggctaacgtattcaatctggcgtaagacctatgtgggggtatacgcagctactgacttgcgaatctcttcccgcgcttcatctgcgctcccccaacggcccatcttcacccacttacccggctccaatgccttgtagttttcgaagaagtgttggatctgcgcgagcagtaatgcagggaggtctgagcactccttgacgtcgttgtacatagagctgagtttgtcatgaggcacagcgatgaccttggcatccgctccagcttcgtccgtcatgtacatcacaccaaccgggcgactacgaatgacaacgccaggtgataccgggtaaggacaaatcaccaaaacgtcaagaggatcgccgtcatcgctcagcgtgtttggaatgaacccgtagttggccgggtagaacatcggcgtgctgaggaagcggtcaacgaagatctgtccgcttggcttgtccacctcgtacttgatcggcgagtggtttgcaggaatctcgataacagtgaagaagtcatcgggaatcgcgttaccagctggaatgtccgtgtagctcatgctcatatctccaagcgtctatggaaggcaaaggccgctgacttttttgccaacggatacacgtgattcgattttttacgctaaccaaccaacagatttaccggctataggacggataaccttctaatcgcatccaagtcagcccaaggttgcgaaaattgcgagctgacctccgcacagccaaagccatgggcgaaaggttgattactcaacgtctcgggctgctgcgccgcgcactttcgacaaatgacaatgccgctctggattctccatctcttgttccattcgactagcctctcggacggggtcattacgtctctctcgtttcaatctgcttggcctcaaatcggtgggtatcaccgcacaaatgcatcatgtcctgcataaatggcacggcttcccaggtgctcttctattcgcagaaactgattgtatttctcgacccgctccccccggcatggagcacctgtcttgagatggccagtgcccatggcgactgtcagatcagcgatgaagctgtccacggtctccccacttcgatgagaaaccattgctcgccaatttgccccgtacgccatttcaatggcggctttggtctctgtcagagttccgatttgattgggtttaatcagtacagcgttggcaaccttttcggtaattcctcgctgaatccgttcgacgttggtgacaaacaggtcatctcccaccagctctatccggtcacccagcgccgcattcaatagcttccaccccgaccaatcatcttccgcgagtccatcttccagtaccgcaatcgggtacttgtcgacccatgaggaatagaggctaatcagctcttgggcatcgaccttgcgattttccgagcgcaaatggtaaaggccgttttcaaagaaaccgcttgatgctggatcgatagcgatctcaatctgagaaccaggtgtgtagccggccctttcaatcgccttaatgatcagctcgatagcatctgagtttttcttgagtgccggcgcaaagccgccctcatctccaaccgcagtggagtagcccgcgtccttgagtaccgatttcagttcgtgataaacctctgctccccatcgtaaggcttccttgaagcagcctgcgcctgtaggtgcaatcatgaattcctgaaagtcaggcccttgccaattggcatgcactccgccattgaggatattgaacatcggcacgggcattcttgcggcctggtcgccgccaaggtactggaacaacggcaggttcatggcagaagcggctgccttggcaacggccaggctgacgcccaagatagcgtttcctccgagcctggatttatcagcggttccatccagcttaatcatcagatgatctacctgttcctgatcagttgcatcctggcctatcagggactcaagtatctcggtattcacattgcttacggccttcaacactcctttgccggcataccgctggatatcttggtcacgcaactcgactgcttcgtgaacgcctgtagacgcaccggatggaaccgatgcccgacccatagctccgcaatctaaggtcacgtcgacttcaacggtaggattaccgcgtgaatcgagaatttcacgtgcatgtatggcctggatttgcgttttcatcgatcttctccaagtaacgattcgggaacgtcattaaccatgtgaatccgttgagaggcccctatatcggacgtcagctttccctgagtatcctgaacagctgcactgtcgacaccgcaatggcgggaaccaagaaccctccaataattagttcaggaatctctcccaccaagggcatgaactgccctccctttgccatctggaaaagctccatcatttggtttgaagcaaccattacagagcagcaatacgccgtctgggcttgtagcctggcgcgcctttgatttagcagatgaaaggtcagcaaggacactccaacgcttacgatgaaaagcgcggcgaactcatagacggatcctgtgaaaaacctgcccatcacaagcccgaatacgatgctccgcgtcactgcgctcatgtggtctcccaattctctaaaatgattttgatgagccgacgtcggtgagctccatttcgcgatctcatctttggattgccaaccgccatcgcgctcaatgttgctgtgctctcagctcgtagcccggtacgcaggtctgggctacgtcggccttgcaggacttctcactgggcatacgcatcgtgaccaatgcgccttcgagcgaggtgacgatgtaccacccctcgctcgagaccttttgactgcctgcgatgccggccagaaaaagtgaccagaaaaccagtcctacgagaagcggcttgttgtcacgagcccagttagcaggggctggctgtggacgtaggttataaactcggtacatggcgcttatccttttttattggttgtccaacaaggtgcgttttttagtttttcgcctggcccactcgaccgtattcgatgggcaatttgatatagctcagtgaaaacgactccttggccaatgcctccagcaacctgtcgcacccaatttcatcagtggatatagtcaccgtgacgggatggtcggcaccgccgaggaaatgcgccgtatgcaaatgccccaaatgatctagcccctccgtaccgctcaccaacgtcgcacccaacgcgccctctcgcttggcgaactcgaccaaccactctcccagtggaaggtgctggtagttggtactctgttcggtgaaaaacgtcagttgaaagccgttcatagctacatcctctaatgtcgcgagtgaccgacgcttcggtcggccttacctcttcatttccgagctgttttcaaactgaattacgacgcgtcagtgagcggtaactcacataagagaagaactgctcgcaccttgcgtaactcgtcagcgtggtcgcgcaggaatgcgcgcagcttgtcctctgtatctagcaattccagacactggggatgacgcatatcgccaagctccgggtgatgatgggagatgcgatggcctggcaaataacctgcagaaatcgtcttgagcatgacctgctcaatttttgctttttgagcaactttaaggaggtgctgggctagtgcaggtgcgcttaggtggtgccagaagctggtcacgcgagcccggctagcgccaggaaaatagagttgcaaagctgtcaggcgatcttggtgatgttcaatcatttctcttcccccacaagagtcactttccgctcgctggcggattcactttgagcatgaaattgcttgatatcagagagccggatttcctccggaagaggacggtgatgcttgctgtggccgacgcgctgggcgtgatagatcccggtgtgtccggatacgaggtaacttgcgatacaggcaatggctgcaagcggagcaatttcgggcccgaagagctccatggccataacgatggttgccagtggcgtattagctgcaccggcaaagacggcgacaaagccgataccagccagcatgccgaagggaaggtgcaagaggggagccagcgcattccccaaggtggcaccgatgtaaaacagcggtgtcacttcaccgcctttgaatccagtgcccaaggagacaacggtgaacaccatctttccgagccaatcccaaggggccattggcatttgaaaggattggacgatgctcggaatgcctagcccgatgtacttatcaacgtcgatgtaatggttactaccgagcgcccacactgcgactgcgatcagcaggccgccggcgaagggtcttaatggtgaataggtgataagccgcttaacgaaggctccgagcttgtgggtcgctgtcgcgaatagcaggccggtaaggccaaagacaatcccagctgccaccacagccatgacgctccagagctgtactggaaccacttcgccaatgacgtaatgcgtgtgaaccaccccccaggcttgccccacctggtcagcaacgattgccgcaactacgcatggaaaaagcgcgtcgtaacgcatacgtccaatggccaacacttcaagtccgaacaaagctccagcgaggggtgtgccgaagacggacgcaaagccagcgctgatgccggccatgagaatcacccgacggtcttcgcggcgcagacggaagacatgcgtcagttgatcggcaagggcaccgcccatttgcaccgccgtcccctcacgtcccacagatgcaccaaaaaggtgggaaaccacggttccgatcagcaccatcggcaccatgcgcaaaggcacgatcttcttaggatcatggatctcatcgatgatcaggttgtttccggcatcaacgggtttgcctatcaagtgatatgcaagtcccacagcaaagccggccactggcaggagccagattacccagggatgggtttctcgccactgggtggcatgatccaaagaaaggaggaataacgcagaagcagagcctgccaaaagagctacaagaccagcgagcgcaagccatttcgctatatagggcagtaagtcgagttgttcaggtcgtcgaaatttagacatttggccagccacaaaaaagtaagtgggcctgaccaaaaagggaatctgagcgcgaacgcctacagacctgaatgatcaggtttctgtaggcatcatcagctgctacgggcgcagcggttggttaatggaggaatgccatctccaatccgtcgatcttagctagctccgctcaaaatgtaaaatcatgttacggaggcagtaagcacaggaagatctcctgaagccttgcttggtaaaaggatgccggactaggtggtttttttgccgacgaagcccatttcaattggagtctttatgtaaaacaccgagatttcctcaagctccaatcgtacgaacaaccgttcagattcgtcctcggtgatagccatgcgaatctcggtaggctgatccgccagttcaaaaaaatgggaggagtgtagccgaccggtatgcccaaaaccctcgatacccgtagatagggtcgcaccacgtagtcccatttctttcgccaaatctacgatccagtcgccgagcatctttccctgataacgacggttctgttgggtaaagaaaatcaccagaaaacctttcattttcatctcctcaacgcgtaccgatcatttgataggacagaagcccggcagccgtcatcgccagcgagcccacgacgtgcaatgaaaccgaaccgagcgcccacagcagcctgccttcctggatcagggcaactgtttctgccgaaaacgtggaaaaggttgtaagcccgccacagaaacccgtgatgatcagcagacgccactcaggactcagggtgggggatgcggccaaaaacgcgatggctaggccaatgatgtagcccccaaccatgtttgcaaccactgtgcctgggggaatcgtcggaaacagagcgtttagcttcatgcccaagagccagcgcaaccaggcaccaagtgacgcgccaacggcgataactacaagtgatttcagcatggcgggctcacctcgtcagacctaggccaagtagataccaggtaagcacaacgcgggagtgacgactggggtagtaggatcataatcctgtcctagattggggacaggaagcggatacacctacgcaccctgtctagggttcacgtagacatcatcagcacaaggcggtttaaggaggaatgccatctcctaacctgagcctaccgcatctgagcaatcggcatcaatatccttttcgggcttcgcagcgcagctcccacgagcgctcaagcgacgggttaattgaaggtggtttgacaacgttccatgccgtttctgatgtgaccgcttgttttgatgtcgaacagctgtaactccttgatcacgagcagcatctggaacgtgtccctgctgcgggttcgaacaaggactcgacaatagtgcaatcagaggtgcttgagcccaggcaggttgtctcacaagcgcctgccatggaaagcagctcaattcgaatctgctggagtttggctactttcaactctacttctgccaaatgcttcttgaccaccgacagtgcgtcagcacacggacgatcagcatctgctgcgagcgcgatgagttctcgtatatcgtcgagtggaaagcccaactcacgattctgacggatgaagacgagtcttgaacgatgcttctctgtgtagattcggtgcctgccggtcgaccgcagggccggaggtaaaaggcctattttctcgtagtagcgaatcgtttcaatgtggcaacccgttgatttagacaacgccccgattcctgacatgcgaattccccaagcattttcttgaacctgtagtggctacagatattaccctgctgaatcgaaaattgatttcacgcgtttaagggcatttcgtggacagagaacagctagagaagaaccagattcccgtctacttcgtcgcggtcattgtcgctgctatcggaggtctgctcgcacctaatgcttctcaagcgttaggtgcgttggtgacaccagccatcgctgtgctgatgtacgccatgtttttacagatcccattcttggatctccgtgaagggctcgcaaacaagcgtttcatgacggcgctgctcacagccaacttcgtcgcgatccccctgttggtttgggcgttgaccatgggcataacggatcaccccgcgattctggtgggtgcactgttggtcttgctgacgccttgtatcgactatgtggtggtgtttacccatatcggtaagggcgactccaaactgactctggcagcaacgccattactactcttgctacagcttgttctactgcccctgtatctggccttcatgctgggtaatgactcggcagtggttatatctgtccgcccatttgttgaggccttcgtagtgctgatcgctttgcccttggtcttggcggtagcaacagctgccggtgcaaaaaggtcacgcgtcgttgagggttggaacgatgcatgggcttggatgcctgtaccggctatggcggctgtattagtcgtagtgatcggctctcagatttcagcggtggtcagagacatggacaagctgctgcccgtcattcctgtctacattggtttcatgctcttggcaccattggttggtgcgttggttgcgcgagcattcaaattgccggccatcactgcaagatcagtagcgttcagtagctcgacacggaactcgttggtggttctgcccttggcacttgctctacccgaagaaatcagagggctagctgcggcagcagtaatcacccaaacgctgattgaattggtcagcgagctaatttacatcagggtaattcctgcattggtttggcgaaaagcgtagcgtcaaccaccacttggtgggggcgaagtgggccgagataccgccgagcagcgccccaagaagccctcctgtgccattttttagacagccactgatcattaaaaaatcacggctgttggggcttggtggttttcaaataccaaagaacagtcgcttcagaaagttttaaccttctacccctcgggttctacagtgacttgtcggcggactatctgaaaatacattgcacttgtccgacctaaacttgaggcgtgtgctacatcgatttaacggattccactttcacgtatttgtatttcttccttgcagccctcacagcctcttgctcagcaagcaacgagctcaacgtgtcggcctcgtggatcaactcatgcatcttcccttcgaattcgtttccgacgcgtagcgtaaccttgagccttggcgtaaaggctttcgccgctttcttcttggctattggagcctctgcaggctttgttaaaacgatctctggcacaggctcctgcactagcggagtaaaaacttgctcctctggctgaggcgtaccaaaaagggcacgacgcatttcttcttcagttaaatcagagttcatagaacatctcaaagggacgcatttcgctgggcagttttaataagattattgctgactggtgttcgagggcctgcgcggacgtcaaatccccagttcgatttcaagacaagagcctcgtaaggcttgcgaaagcttcacctttggcagcagtgtaatgagcccatcaactaagttgctagcgtgacgagcgtacagcgtgactgtgcctgcatcaggcgttcgacctggcacgatggcacctacccgctgctgggcaattttcagtatgctcaagacgtcctgactcatctcattggtggacaggtgttcaaccaatggtctgggtggaggggcggcgcggctccacatttctatgaccgcttggaggagtccgtctgagccaagatgctcgagggccatttcccatagctgaccttcctgcgccatatccaggcgagccctagtcattacggagttctaacaagtgaggctctttcttgattgcgagttttcccagctgtcggcggctgcgaagctgatatcactcgcattggtggctgaggatgggagcgaattctacgtggaattgctcgatgcttggcaagaagaagactgcagtgatttcgttaaggaaatcgtgcttccgcagctgtggggtgggagctacgcattgcccattgttgaagccaggatgtcgctgctcaggtttctgacgtcgttcaaaaaggaggtcgagatcgtcactgatgctccccagtacgactgggagcttttttgcgatctggtctatgacggcgggcgatggcccagaatcgttcgtaatttccctactgacgcaacgacacttactccgactagcgagggcgaggagctgccccatcatgctttgctcgacgccaggattatcgctggcatgtttgctcagtgatgccagggtactgttgcgggtcgctaacctttacgacggtgaagtgacgtctaaacctctagttcagtgcaggaattcgttgaggttacgcttcatgggctggccacggtggtgaatcagcgtgggggcagctcagtgaagcgaagtctgggatagatcctctgttcaaccgcgcactcggaaatttgccagaatgccgaaaggagtgcctgctctgacgggcagtgccgcgtcataacctcgaactcgttgtaatcaaatgccactacacgaacacgtacatcatccatgaaatccaagatcatggccccgtactcttcataggtatcgctaaacagctcttttaccaccacgactcctacaaggggacgtgctgcaagatcgattttgaggggcgtaccatcaacaagccgcagcgcgggattcccctcacgctcgatagttgaaactgcgccacgtagctgcgataggcctcctttcaactgactcagggccttcttacgctttcgttcaagctttgtccccatcatctcagctgtgtttgggctgtccttagcctgtagtaaaagcgtgacctccgtccccaaaacaacagcatcggtcagctcttccccatcggagactttcactggcccatggatgatttgctccgccgagtaagcacgctggagcagatagatgatatccagctcctgtaggtgtcctggctccggtcgctcaaggtgagtatttgagaaacctctggagccctggaagccttggcgagtgaggtcggtaatcaggaagtcgcttggaaatagatcctccaagagcgtcaacgttactgctcggctgtcatcttccctagtcgtaaagctgaaccaggtatctgcctgctccatcatgaggggccagtgctccttccccaagggattgacacccttcgcatactttcggagcccttcaaggctagcgtgcgctgtactgctgagaagctcgcgattgtgttcatcaaaaaaacagacgctaaaacggtcaggaagacttttcaggccctctgtaaaaggatcgctacccatcagaggtgttttaatagtcagcggactaatcggatcatcaaagcaggccgtcaacagcgtcaggccttgcgcctcatcagactcgtatggcgcaagatagaacttcagctcgcgcttctcacgtgcggcgaggataaattctttgcccgctttgaccacgagcgctgggccatcagggccttctacaatccaaagaccacgaccgagcgatgcaacgtcctgaagcacttcgggcttcatgatggttaggtacattggagcccctgatgaaatttcccttagcgttgccgcatgggcttagaacaatttatccaaaggtacgaatactgaacctgtctcagcagccgcccgcactttgcggtcgattacatccgcgaatggtatgttcttgtctaaagcatcgttgatatcttttcccgaaatgcatatcaggctcttgccgcgcccgaatgcctccagtccaacgtcagtgaatccgtagtaactgataaaaacacctcgtgtccaagctgccttttggctgatcttgccttgaaaaatgtgcagctcccctgcaccaacagggttcactacccacttcgcctcaacaaggtagatgtcccctcggcattggaagcttccatctatctgttcccccgtattccgaaatggtgcgcgaggttggaggttggatgcctcaaacagctgctggaggaacgtctcgaatgcgtagccacgtgcttgaggagcgagcttatgaatgtccagcagggccctcttcaactgagctgcctgatcaacatttacctgacgcacagctgcgaacggatcgcccttgatgacgtcggcagatgagccggactccaagccttgaatcaaagtcaggaagcgcccctcggcgttaatcacaggttcatctttgtgttggttggccagcgcagcctgacgatattgccagagtgctttgagtgctcgtacgcaagtcggtgtatcggcaagcgtgaggaagctacgcaggcgcctagctttggatgtgccatccgcagtgaacagcggatcatcaatatcgatctccagctctccgaggaagaactgggacatggtgcggtctgagaagtccaacacgtaacccccttccatctcgaaaagaaggtcgattagcttcatatccagtggtttgatcttcggcatgccacacgtccttggctaagcatagggaaccgagcatacgatatcgctgaaagtgtccaataactatctgctcccgaggaagcgttaaaaacctcggagaccggattcaaaggccaacagttagggaatcgagcaggcaccattgtgctggcgtccgaaatggcaagcggagcgcttaggcccaagcagggctggagacttgaggatggaagcccgaaggggccaagtcccgcaacagcgggattggtaaacgacagccatccccgggcaagcccaaaacaacgacctcagagctactggaggcgatccggcgttggcagatacctgtctcccgctatgcgcatgaactcacgcaagctacgccgtccgacgtcccgcctgaacgtcgcaatgacgtacttcgagttgaccgtattgatcacccaaaacctgtcttccttcgttacggactgaatgtcggatgtccgaatcagccgaccatctgcaaatcgttggtacggcccagggcaaatgtggccgaacaccacaccaacagcactgcacgcatgaatatggacattcaccaggtaggccgtgaccagcccgtcgtagtcctgattcactgctttggcgatgcgaagaaggtcgaagtccgagtagcgcttttcgtgtaaatcgactgcgacggtgttgatgtcgtccatagctacagagcctccgacgctgaggctacgccggtggttgcagcactgcgccgatatagctccctgaccccaaccaaggcatcgacatcgaggtcgcgctgatgggtattgacgtacacatcaccactctcgacctgcagaacacagattggcacttctgcctggttgaaccccatggagagcgatttcagcttttccatcttccagcctgaccctttgttcatccatgccggggtaacgacctggacatcttgaatgaccatgctctcgtcttgggagaccagcagctccaccaagcgaggctcatcgttcagcatctcttcataagctacgaatcgcccctcatgccggcgcttgaggctcacgtgataccaatgggtaaccaaggatcgcgacatggcgtgaaagtgagcgagaccatccccgaacatacccaccgggccggcctggtcttgcatgctaatcctgaacatcgtgtatctcgtgttgagcaggcccgcgaagtgcgcctgcgattaacataagccaaatattgtcttcagcgaggcagtcatctcgcgccctttacctaccaaggcgtacaccgtatttcgggtctcgaacaggcaaacgccgtcgaacgacttacacagggtcgagcgtacccagccccctggagggaaccggccctggctgtcgtaggtgacgcaatgggaataaaggaacattgtctgcaggcctatggcgcgcaccctggcgagcgattcaggaggctcgtccacatgaaagatcagccaatcctcgaccaaacagtagggtttccgaccgaaacgatccgccaccaatgcctctatttcggcttgaggcagctctgttccaaaggacgatatctctccctcgcggagcaactcatgctccgaagaattacccataaattgatgatcctcatggtgcgaacccaaaaatcaggctctgcgaacacgcaaaatactgggcaacaagccagaaatcccatcgatatgattatatgcatttgtgtgggatctatcaaacgcgtcataccgtctctttttaggagaggtaggttggatgtccctgcggaaggcttatgcggcgacgctacagtggctgaggattcgaaatggcttatcgcaagcagacctccagcatcaagctgaccaggctcacataagccgcttggaggctgcgacgacgacaccgactattgatttgagtgcggatctggctcatgcgctgggcctaacgcctttgtcgctgctcactctggtggccgcagccgatgagggcaagacagcacgctctgtcttgaatgaatcgatgatagaactcatgcggctaggagttcttgatgaagcgctgcctgccgagccgcagaagatcaccacaccacagagaatcgcagccgcagaaaggctcgaggcagtacgcaaactcaaggcagaaggtctttctcaggcagaggtctgtcggcacctggaattacccagaagcactgttgggcgcctgtggcacgttgacgattaaaagccccccctcggctcaaagtgacagaggcaggggggcactgatcaataagccaaacttctggccattcttacgatgctttcctgtatccattgctccacgatgggccgtgtggcagggatgaaaagtcgtgactcactaacaagcttttcacgccgcataggcatcgaatagctgcttggggcagtcgctggcggctcttctatcttcgccatgtctaaattcttcaaggtaatgcgataccaaccggtgctgaatccggccacctcgaagcaggacataattagctttgataggttggtcggagacacgaaatagagaccagccgtacgcccctcgactggcacacttgcgtcagcttccaaaaggacgagcccgtcgtcaaaaacgcgccaagacgtatctccggacttcaatcctgtgaacaacttgtcatcccagtcttcgtaaccttgcttgaacttcgccaagcccagtttatggaagctatggaaaatctcatcacggcgttgggccgctccgtgcacagcgtgctgctcaatgggctgtggcagaaacgcgaactcaagctgtggcgcatatgagtgaccgccgtaggagcgagagcttgatgcctctgtaatgcgctcgtgaaaggctttctcggaaattgcgcttttggatttctccattctactcaggccctggacaatagctttcaacagctcttgggggtctgagaatgaggctctgaaaaaaccttgtttgtagtcagacacctcgttgacgaacactgtctgcttcgcgtcaaagtcagtctgctggatgaagaccaaaatcggtttacgcttgctcactgcctggtggaattcttgctgcgtaaccgagagacctgactgaggttcatagccgtagttagcgccaagaatcaggatataaacgtcgcactggttgacctctgtcaggcaggcgtgctccgaggaataggttcgcgctccgaagtgctcgctcatgaccggcttcatgtccagtgtctccaccgcgtctttggcggcggctctgaactgctcgaatcctcttactacggagcttatgaacaccttcatcagtacatcctctgaacgctggcgtatgtgtccttttggactgtaactaggtgggatcgttgcagattgtctcaatggtgaacagcagatcagacaccgtaccgtttgttaccgccagaggtaatgcagtatcgaccacccctaggccctatacacacgtttccagaggaacaggggcacgaggaaccgtaagctggagtctgttggcgagcgggcagtggaagctgggccgacggtctgggcttcggcacaacgtagcagccaggcccactgcatagactcttggacgaaagccatttcgaagattgaccatcaatgctgatgcgcgcccattcattcctcgtctcgaagacctgaaccttttccccgcgcttcagtttggagatgacctttccaccaggttgatccctgacattgagattatcggcactcacgaagtgctcagttgcggaatcaggagccggggctggcggtgaggccggggaaatcgacgcaagcgtattcggcgtgctaagagcatgtggctgtaccggggctggaggcgtgtctttcttccccattgcccacaggacggcaaaaaggatcaggagcgggacaaaccatgactgggacttcttgcgcatatccatttgctctcattcgtcacgtatgacaacggctgtcctcctgaccaacctgacatcatcacctattgcgagcttagccaagcttccactttttgcagcctgttcagtaccaaaagcgtgggcttgccaagatccagtaccctaagcagccgacttctcgccccaggggaagggaaccattcggcaacttcaacgttgcagtgttttgaatcgctcaacgcccatttcacaatcatgtctgctgcagctctgtagtgatcagccatgaagaactttctgtcctctacgggccatccacgctcccttagctgctcggtcacatcagtgacgcctgtgtcaccgaagaacgcatcggtatccgggtagtgaatccctgcaagcgatactttgacgacccctgcctctcggtcaaagtacgaaaggaagtgccagccaccggtgctgcaccccaggcgcgggaagttgattgcggccttaccagttatgtagtgccggcgagaaacgcgtttgaggtcaaaatcgaagagcggttgcttcatgtgacatgcctctgtgcacctgcgctacctgattgccaggacacgccctgaaaactgaagactaagacccagcaagtttccatcgggctcagcgtctaaggtgacttagaatcaccgccatctgaactttgctaggcacagccccatggacaaagacctgatctgccaccaatgcttgaacgaagcctatctcattgggttgatcaggcgaacaggcgtgactgcggagtgctcgttctgcttaaaaaggcgtaaggctatcccattcgaagaccttatcagcatggtcgacgatgtcctccagaagtattgccatcctggagcgatatacgatcagtacgatgacaatgggaaacgctctgaaacagagcagactggcgacccccttatcttctatgtcgcagaattgcttggtttggatgaggacgacccggttgccgagcgtgttctctgcgacctcaacgaaagctcccattacgacatcatgcaaggaggtgacgcgaggtacagtgatgatgaaaactatgagtggagagtgattcgaccaagagaagcagatgctcgatggctaaattttcagaacgaaatgaagcatggaaatcgattttttagtcagcatgccaaggattttctggactggctgtttcgagggctttcaaccttcaaaagccctaatggatcaatgtccgttgtcaaagagcttgtcgacgatcagatctttcgtgccaggcgctgtgattccgcttcagaatacgactcgatcattagcaaccctgctgcagaacttggcccgccacccaaggaggtcgcaggggctggccgaatgaaccctaaaggattggccgctttttacggagcttttgaccgaaaaacctgtgttgccgagcttcgcccaccagtaggaggacgagtcgtcagcggcgaattcaaactcacaagacccgttcgcgtcctggatttcattgcattggatgaagcctacgaagcgaggccgttgagtgcgtttgaagccagctacgaagagcaaatgggtaggcgcatcttcttgaaaacactccacgcaaaaattaccgtcccggtgcttccgaatcaggaacacgaatacctagctacacaagtcatggcggagtacctagctacacaattcgacccgccgctcgacggtgtgctgttcgaatccgctcaagtgcggaaaggtacaaacctgaccctttttaatcatgccgtggtggcttcactcgagcctagaactgctttcacgaacctagatgatttgcttagcagcccctcatcgcagacgcctgcgattgagtacgtgcctgacacgctggtaaggcataaggtttgtcgtgtcaaattcataactgaagacctgcagcgcgatgatggtcagccagagtctgacgagcattacgacgactgggatgattactaaaggctatgtacgctgacgtaggtgttagaagatgcgcggctgcgacagtcgtcgttgccgactaaaagtcgaccgctagagagccttcagcaggttctcaagcatctgatgctcccatgcagatagcagtgcaatggggtctgtgccaaagcgatctcctgagtcaaacgaccagtgtcgcccatccgggctgatgcatttttcgcagtaatcgagctgatcgcagtcgttgtaaatcgatgtctcccaactatctacattgatctggaagtggccggcataaatttcgtcccgcgattcatgacccaccttactcatgacggttcgaccgaaaatcacctccctgagtacgtgggatacctctcttgcggagagctccgccgcagtgttttcgctaacgctacctacctgggatgaacgcgctgccgctctggcctcttttagccgttgctcagcgtacatagccgggtcatcagctggcagtgggtagccggcagcggatagagcttcggcacgttcttcaatgagtaggcgctcgggatcgcgaaccttttggtaggctctgcctggtacacgtcgagttgtgtccattcccggctccccagaaggctgatgactaagagcgactaaattagttttagaacgataacagaacgcttctaatagcgatgccgagctccgaatcatgagggtaggatgcgttgcgatctatgcttcacagaggctcagacaccaagcaagcggagcgcgcaggcgtgagggatgcgagcccgcaggggcgagacacgccttggcggggctcgattcacggcagcctaacgccgcaggcggcatgccatcaacgccaacaagaggtaactcacatgcccgacgatgaactccgcgaactagaagccaagagacgaaaggctttgtggatgctatcgagcatatccccaggcgagtcgaaggcgttcgatgccttatccatccttgatgatcttgaccttcaagaacggaaatactcccccaatgctgacaaggcacttgatctcaaccagcttcgggattgtgtcacgctgcagcatcacaactccggaatcgacatcatcttggagcagactattccgcagccctggcgagaacgctttctgcaagcgagcatcggatcaaccagagttcctgacgggccctacgccacgaactgggataaatttctgactgaatgggagcgtgagatgcagcatctgcaaaatcaccgagttgcacaggctactaacagctagaacggctggcgagcgatggcggcgcaaacacacaagcagtcggtgtagccgctgaaagtggcaaccttcaaacaggagcagcaaggtggaacggccttctttttttatcgatttcgaggcatcagggatagccccagatagctatcccattgaggtggctgtcgtgtcgagtgagtttgccttcaacacgctgatcaaaccagctaggtactggactcactggtcgtttgatgcgcaagacatgcacggtctctctcaaaatcagttacatcacgaaggtgataccccagtggctgtggcgagaaatatgaatcagctgttttcagggcaggtgctttgcagcgattcaccacaagatggtttttggctcgatgtgcttttcgaggccgcagatctgatgccgacctttgagttgaagcctttggaagtttttgtcggtcgggaggcggctagtgacatttatcgcctactgccaacaactaggcaccaccgagctctccatgacgcgactgctttgatggaagcctgcggcgcttttttcaaagattgaactacctcccctaaacttacgaaagctctgattcctgtggttttggatgtagctcagcttgtctgaccgcccgatccgaagccaggtaattatgcggctggatagggcaagcggagcgcgcagacgtgtgggatggacgcccgaagggctaagatgccggcgcttgcgccaaggctcggtttacgacagcccctccccgaaggggcacgccccaactgaacgctcagggtcatcaaagctccgcatcccaagcatccatagcctcgctcacagccgcgtaccactggagatcaccaagttgtagagcgttcgcgatttgcctattggtattgccatcgacccaagtggggagactctctatggctcctgtgaacatgcttgctgaagcgacagcgaattgtcccttactcatagactggaggcacacgtagcgaactgcagcgccagtctgcatccgacgccaagccaccacctcaatacagtccatggcgctcgccggtgcctctacggtgagactcactagctgttccacctgggcatcttccgatgctctgaatgatcggttaggcgcttctggcctgtggacaagatgcttcaactgctcacgcgaggcgactatctggtcgcggagctcttcagggtcgatagacatgccgccccggtcggtgactgaaagggtttttaggctgttcgctgccaagatgaactcgcgttctcgcgctttctcccagtcagggcgaccgtcggggttgatgagattccaaaggcttgtgaacagcttcaatgacattctcctaccttgaggcattgggcgcggatcccgcgatcatacaagcaaggtaagccgcctgaagcgaaagccctgcccacaatattgtagggctaacgacctgtttgatattcaaaccgagaagcccacacagagggtgtcacttcggttcgggcgagctaccccctgctgcatgatgtcatgcgtgcttaggatcaaggccagccgcttagatcgtgagacggctgtgtaaagcatgcttcgttccacaaattcgctttgactcagagtgcaaaggatcgacgtctcgtactcgctgccttgcgccttatgaatggatatggcgtaggcaagtttcattcccagcccgaacaagtccatcctggagagggtcacttcgagcccattgaagaaaaacacacctgaagtctggccatcgattgacgtaatgccagtcatgatcccggtgttgccgttgaacagattatgctcgtagctattctgagtgacgatgacggggtcgttaacgcgcagccagtatttgcccatccagataccctgcgtctcgtctgtatgctggagggcgctttgcagatgtttgtttatcttgtgcccggaatccggcatgcgatcagacatgtgtggcgtcaggatctgagcgtcagggatgatctgcttgatcttcgcgaggtgtgtcagcatgtcctgcgtgtttgtgcaggggatcagataaaccccatcgctctcgccattccagaatggcaaggtgtccaggtgaccagatctaatcttcatggcgatgttctgaagatgactgttgccggtagacctgtgaaccttgatcaggtgggtcgacggtatcgccttcgatttggccagtgcatggaagaagattccataaccaaccggagatagctgaccggtatcgcctactagcaagagagacagttctttcttcgcaaaggcattcagcagtttcagcatcaaggcgatgtctaccatgctggattcatcgataattaccagagggtcgcctccagtgctgagtcctgagcttgcagtgctgattttgatcaagaaactgtggatcgtgtaggtgtctcggccaacagactccttggcgcgctccttggcttttccgctcagtgctaagacatgcacagggcggtgctgagaggctatatcaacgatggctttcagcaccgttgtcttgcccgtaccgccaaatccagtcagcgtgctgatgcgattagtaagcgccatcagcactgcgcttttctggtctcgggtgagtgagtgtccaggcacgctctcaccgtgtgcgcagtaatcttcaatcgcttgctccagttcctgcggagaaccgtgaagcaatgaggcctgagcggacagtagactcgcgactcgctgctcgagtttactttcgacaagggccgctcccagtggctggataagcgtcgtcccttgatacttcttaacgcatacagcacgcctttgtagggcgcattcgatagcttggtctaccagtctggcggatggaagcttctgcatcagggcggcttttagctcttctatttcgtatgcggtatggccctgatccaagcgcacatagagcaaattctccacaaggccggccagcctgcgtgggtcatcacgaggtatgcctagcttggctgctgcggcgtctacgattttccacatgtttgggtggatgccttgaaacgcaatgaggctgtacggattaagcttcaggcgctctaccgtatccgtctggcaaaccttgagaacgcttttggcgagcccaggatcgaagtcgtgctccatgagaaattcaattgttgaaatctcatcctgaagtgtcctccaggcatccacgaccttttgggcgagatcaggattaatcagttccgccaggtggctgactctgcctgcagtcaatgcctgagcaaggttttctgcgccaaatgccctgaccagtttcgagactttcgctttgccgaatgacagcccgcgaaatgcaggatgctttatcagcaatctttccacatatgccgctatgggcaggtttacgatgtgacagctttcgatcagaacgaaatccctgtactgatcatgccctgtgatcgagcctttgaactgccagcattcaccgggttgaggaatgcgggtgatgactttatagcttgctctgcatgtgtaaattttgttttggccaatgatgcgcccggaaaagactgcaccgccaaaactgcctggcttcaccgagctcacctggatcacgctcgacagattgctcataggatgaatgaccgcccggagtcgatcatcaagtcctgctggctactgatttcctgtgcagatgtgcgaagcaaccgcagctcggcagagagttgctcaacttgctcgcggagcagttcgttttccttcgacttttgctcaagcattactcgcaaccgattcgcttcgcgacttttcgaatccgccatatcaatcgccagagactcaggatctttggccgcaacaaactcactgcctatgcggcgaatgtccttcgcgatgacctgctcaagggttttgccctgtgagcaaaagatcttcttggcgctttcagaaaaccactgcctacgattaccacattcatcagcgattttgctgaagttgacggcgccaaactgattcacaggaaacttttttccagcctgttcaagctgcagcacatagtccctgtagcggtcgtacggagagcgcttttgatcactggtcgccatgcgcgcttcctttagccttcatccaaaggacgaaaggttcgacaagctcttttgggacaagaccctccctaggttcaaggtcgtcaaaactgcagcaaatctttttagcctgcatgtcaactgtaaacatcccttcacttgcatcgagcaccaacttgagggcccggcaggttttgtcaaacttcgccatgaatccttgatccacaggcgttgtgtccggcagggttactggctgagcaccatggctacgaagggctgagcgcagagcttcgacctccttcctcagtttctctgtctcagcttgaagttggtctgctcgctgaacggccagctttccgacaagcttgtccttcttggactccatgtttccagcagcatcccagtgcttgaagaatattggcccgagcagagtccaatagtcagtgctctgtaccaaggttctgtagccaatcttcttttcgtttacaggaagcccatcgttgtaaagttcggcgcagaatcttgagtaaggcgtaaccccatcgaatgatgcttttcctacgaaagacttcagcttaggtattacttcgtctttaattcgggaaattctatagtcgcggttcagcttttgagagcctgcaaagcggttttggcccttttttgcacctttgctcatgcaggaacacctcttgggctcgaaattagcttcaggattgcagtaggtcgttccaaggccatgggcttactcatagcatcattcaaatcatgcagtgaaagacccagaacttcacacgtagaccgaatcagacccctaaattcatcgatcaacgtgaatcctgtaggagcttcttgcagcatgcggttaaagtctccagtgaatgcaaggagcttgtttcttgccactttaacctgcgtgtctaactgtggagtgaaatactccgcatgcgacttagcttctgcagtgcgagcaatcaggttggaaagcgagtctttcttgagctctaagcgctccaggtgctctgagacgatttcaggtttttctaccaggaagctttcacgcgttttgatttcgttatgcatttgctcgaggcagtgagcagtaacgctccatgaaatgatctctgcggcgaggaatttgcgacgattggcttttggcacaaggctttcaggcgatgctccattccttttagactcagcgatataggcctccagctcgctacactcgtcagttagcacacgaatgtgaccgtatatccttggcaggtggtcgacagttttgaccgagtaatagcagcccccgcacggcatacttatcccaggaatggcacccaggtctttaacgacgtccgctgggcagcgattaccaaatgggcagatatgagtgggcataaaggccagcgagtcgatggggcgctgccttgtctccctgacacccgaaaccacatcatccttggtctcacggtcaaatgagatcgcaccgaagtcaatcagagacttctccttgtctcgccggaaagcctgctgaagcttcgatgcaacgtcttctgctttgatgttagacattgctgggcggtcaactagccatccatgctcaatactcaatttttgatactgggcaaccgattttaggtatgcagggtcaacttttgcgtaatacattacatgttcatcactggcatggccggtaataaatgcgccgatgatgtgtggcggcaaaattgggatgtattcagatacaactgatactcggcaggagtgcggggtatgttcgattaatttgcaggcctgtccctcaagtttgatcacggtgagatagtcgtgaggatcatcaatagattccagatcccccacagcctctggcattgcgttcgtcgcctcaatgcccagctgaaacctgcagaacaagtcaaaagaataaattagccttttgaaatatttcgcataggcctccggagtcagcacgccaggacttgttcccttcggaaatagcgtgatgattttgccatgctcattttcttcatggtagtcataccaggtttcgacatccattgcgggatcgttaaaccaagggatcatggctttttgacgatccagcagttcaattaccgtcttcgaaacagtagcgtcccaggggccgtttactttgtcagtgttgatgcgtaacttgcaaagcgcaggcaggggtcttgaacgatcaattcgcatatcataggttcgcctctctagccaacgtatgtgaatactacgaacccctgtctccagtgcgatgatattatgtctgatgtaattgagctgaggatagaacacccacttcccttcgcgttcaaccgagtgttcaataattggcacgacaaaccttggaagaagtcgcagcgcctcatacttcatggggcgattatcttcggatttaggctgcgaagcgtcaaatgatgggttccggtagaacacaattggaacgtacccaagtttttcagtttgaacgattttttgggtgttgttccagtcctttgtttcaatatctgccctgaattgtttgtcgaataggtttatttgttcgtgatataccctttcggctaggtgagttgtgaaagactctatcgcgtagcagtattggagaaggtatgggaaatgctcagaatgaaatgcaggcttattagagctattccttcttcgcacgatggggaaatcgagctcaagtatggggcaaacaaaaccagaaagtttctcgtcggcgctcgagtgagccgtcaagtagttgaaaaagctggtgatgtggtacatgatctgctggatcgttgagtttgacctgcctctgcgaagaaaagtgaggaagcctatgtatccatcgccctccatgtgcgtccgattaagctcacttgggtgaggaggaagcaatcccgtggcagtagggtattcgccaaacaaccaggtattcagaactgagaagctcttgctgtaagcgtcgaaagacttaataccccgagacttttgtaagccggtgtatttgtcctgatatttcaaccacgactcgacactttccttgtgctcatcaggatagtcatattcgccagaggccagagcttttctactggcgtgcaaatcatttttagggcggacggcgacctggctacatctgtcagaatacagcctctgaacatagttccaaaacgcggctggggcgatggggtactggaaccagtcaacgtcatttcttcgcgttaagaccaagtggtcggcgaggtcagcgatgtcatctggattgatgtcttcgattctatgccagtctgtgcaacgaatcatgcgccatgcgtaccatccaaagtttttgacggcactaggcttcattacggaggtaatgtccggaatgtcttcgtagggaacatgcgagacaaacggtttgctcacaaatgcaagcacctcggtataggatgctgcagcaaactcatagaagttggttccttcgtcctgattgtgaaccgtgggcttcctaaggtcagccgggagcaggacagctcgctcctgccagagaaagtgaagaattaagacgcagtctttactcagcctctccaaggaagacttgttgagccagtcaatagaggccttcggaacgacctgcttcgcaatttctatcggcgcagtctttttcgtgcaagctaaagcattacgcacccactcttcatcataaataggtgcattcgacacgttcaggtggtcatcaaacaggcgcacgatggacgcgttgtaatattcgttacgagcgccgcttgttaccttacttggagagatatagttcgtgccaaacagctctttgcagacgcaagccttggctttcgtgatcgcctctttaatggagatatcaagaggcgctccagttttgataatctgaatatccttagtcaggttaatcatgttgcgtcccttgaatgcgattcgcctcgtccttcaatacttcgagctggcgcagataaaactcctcgcgaattgtggtaaaggaggcatcgcctctttgcatgacgtactggttagcatgttgaatgtatgcttcgatgatgtcggtgtcgtgcttcgcgtacttcatcgtggatgtaacgctggcatggcccatcaggatcttcacgtaggtaatgggtagaccaggaagggtttgaccaggaactggcatgtaattaagcgtgtaggttccgtacatatgcctcagagagtgagtgctgatgcctgtgacgtccggcaagcctgccttcaaagagtatttcttgaaggttttgtcacggctgctcctgtcgcttgcgaagaagggcctgccgtcagagttctgaaacaagaaatcatgtccaacgctagagttgtattctagggtcaggtacttctcaaggctctcccagaatattttagcgaatggttcaatcatgaaggtgacctcggtctcccgacctttccaggagagaagcttatgctcttcttcagtaataccaggcgctttcctcgcaaaggggtcgcgtaggaacactgcaaaatcgtcatcgtcgatgtcggacattcgaacttgtagcgcctcgcttgtacgcgaacctgtcgcggcaagtagggcatatagcgtcatatccctgtaaaatgtcgtggactttgcaggcttggcctgtctgagaaagtcgatggatcgttctatagggaatggaaggatcttgaacggctgcttgtcgtgtttgctgttcctacgccctgctttagcaaacagcttatctctcttgcgtttaggcaaaactgagttcagcgagccacgaatgactgctgccatccatgaattagctttttgggccgaaacctcatattgacttcgatattcggccttgctcgagcagaaccgactgaacagatggtcaggtgctgtcatgttttttgactcggctacctcaagaaaccatcgaatagacgactctattgattccgcgattgagttttgaccggttagccgtgtcttccctaggctatgggccagcgtcttcgctatcgggttcgtggcgtccgtaccgaagaggagataaacctggtagctgtagatgacggtctcgatagtgacctcgacatctgcaggaaattgggttttcgtcgcctcatatacgtagtcgatgaagcggccaacgtgctccgagtagagcttatcggtgtttcctgcgtagcccttacgtgccagccacgtcgtgtagtcggtgaacggtttgaactcgcgtgcctcgtcgggcatgccagggtcgagatgaagcaggatgtagttagcctcgctcgtaacgggcgcttcgaccaagatgaagtttttcatgagctcttattccaaataccacaccctattagctttgggtgtcgcacttgcctttgtcaaggaaaaaggctcaagtgggtgaatcaggccaacgcagaaagctccgtcagcatggccgttggccgtctgcggagtgcgctaagtgcttgattgtaaggggagatggggccaccggcgggaatcgaacccgcgacccaccgattatgagtcggttgctctaaccaattgagctacagtggcgctgagaaggtgcaaagctatcaaaaatcaggttcaaatgccacaccaacattcgtaccacataagaacctacgaccaatggattatgagtccactgctctaaccaactgagctataggccctgtaacaggtcgcggattataacgatggtttccccgctgtgccatccgaaaagtctgaaacgcgcatgcgaagaaaagtctcggcgaaaagctcgggcggcaggggcaggctgacgatgtagccttgcatctgctcacagccttcttcggcgaggaacgcctgctgctcggggttttccacgccttcggcgatgatggtgaattgcatgctgtggcccagggcgatgatggcgcgcacgatggcggcgtcgtgggggtcgtcgggcaggccgcgcacgaaagactggtcgattttcaggaaatccagcggcaggcgcttgaggtagctgagcgatgaatagccggtgccgaagtcatctatcgccagttgcacgcccaggcgtttgagctggtgcagcacttccagggcttcttcggcctggctcatgatgaagttttcggtgatttccagctgcaggcagccgggttccagtgcgtggtcgcgcagcagctgtttgatgcgcgccaacaggttggggtggcgcaattgtgcgcctgcgaggttcaccgacagtgggccgaagtcttcgaaggcatctttccaggcgtgcatctgctggcaggcctgttccagcacccagtcgccgatctgcaggatcgtgccgttttcttcggcgagggcgatgaagtgttcgggcggcacgtcgccaaaggtcgggtggtgccagcggatcagtgcctcggcgccgatcagttcctgggtcatcaagctgagtttgggttggtagtagaggctcaactcatcacgctcgatggcgcggcgtagttcatgttccagggccacgcgctcgttagcctgcgccgtgaggtcgcgggtgtagctttcgacgcggttgcggcccttggccttggagcgatacatcgcggcgtcggcgtttttgaccagggtggcgacgtcggtgccgtcctcggggtagaggctggtgccgatgctggcgctgataaagaactcgtgttcgccggcctggaagggcggggtgaagcaggcaagcagtttattcgccaggtgctgcgcatcgctggcttgttgcaggccgggcagcaggatgatgaattcgtcgccgcccaggcgggccacggtgtcgacgtcgcgcaattgctccttgaggcgcacagcgatgtctttgagcagcaggtcgccgatggggtggccgaggctgtcgttgatgtgtttgaagcggtcgaggtcgaggaacagcaccgcgccctgtttgccactttcctgttggccgttgagtgcggcttgcaggcggctttcaaacaaggtgcgattgggcagcccggtcagcgggtcatggtgcgcctggtagtcgaggcgggcctgggccagcttgaggctggaaatgtcggcaaataccgccacaaagtgcgtgatcagctgttcgcggttgcgcacggcgctgatggtcagccagctcgggtacagctcgccgtttttgcggcggttggagatttcgccctgccagtggccctgggccgtcaactggtgccacatggcggcgtagaacgcgctgtcatgcaggccggaagcaagcaggcgaggcgtctggccgagggcttcggcttcgctgtagccggtaatttcgctgaaggcgcggttgacggcactgatgttctggcgggtgtcggtgatcagcacgccttcggcggtactctcgaagactgtggcggcttgttgcagtttttcctgcatgaattggcgctcggtgatgtcccgggcgatggtcagcatgcagtcatcgtcgccgatgggaagcgggcggctggacagctcgcacaggcgaatctggttgtcggcgcggcggatatggcagacgaaatcttgaacaaagccatcgcgatgcatcaattccagcatgtgtttgcgttcgttgagatcgacccagatgcccaggtccaatgtcgactggtccaacgatgtggcgctggtgaagccagtcaggcggctgaagccttcgtttacctctatcaacagcccgtcgcgctgacggctgagcagcaagccatcgggcgatgcgtggaaggccttggcgaacttctcttcggacgtttgcagcagttgctgggtttccttgagctgggtgatatcgcgcaccaccacgaccagtgcctcggtcgtgtcgagctggaagggctcggccgagatcaggccggtgaacgcttggccgttgctgcgccgaaacggcatctccaggttgcggatgctggtggtctgcacccgttgcagcaggtcggggccaacgccttgaatgccccagatattaagctcggtggcggttttgcctaccacgtcctcggcagtcaggccgatctgatcttcgaaggctttattgacctccagcaggcagccgtcggacagccgcgcgatcaccagaatatccgggcattgctggaacaccgaggcgaatttctgctcggacaattgcagtgcttcctcggtgcgcttggcttcgctgatgtcgatcatcaagccgcgcagcaccggctcatggccgtgttcgatcaggctgacaatatcgcgcacccataaacatcggccgtcggcggtgatcacccggtaatcgaggctgtggtcgcggttggcacgggtttcccggtagcagtaagcctcggcgcgagtcaggtcggcagggtggatgatgttgcgccagaagcccgggatcagccagtgggcgcgagggtagcccagcaagtcttcggcatggggcgaaacgtagctgtaggtgaaatcggtgacgctggcttcccaggcgatagcagacaggctctccacgaggccgcgatagtggtattcgctgctgcgcagttcctgctccagggcaacacggcgcgaaatttccgaactgagccgacgattgatccgaataacaatggccaatacggtgctcagtagcagcactgctggcaggccgtacatcaacaagtcggcccagaaggtgcggtggtcagtgatgctgccgacccagtgttgttggatggcatcggtttcgtccgagctgaggtcggcgaggactttgtccagaatgcccaccagcattttctcgtcgcgtggcacacccatcgccagttgatagcggtagggcgtttcgccgctgacgtacaaaccgtccagtttgagttggcgcaggctccagacgctggacgccagatcgccaaccaccgcatccacttcgtccgtggccagtgcttgcagggtcgagctgacgttgggcatcgccaccagattgaggtcggggtggtgggtgcgcagtaattcgtggggcgcgtagttttccaccacggcgatcttgagcccgtacaggtccttgaggttgcgcggttttgcgccgccctcatgggcaaggatgacgatggggaagtcgaggtaagggcgtgtgaaggccagaaagttctggcgctccggcgtggacatgatcccgggcagcaagtcgagttgattgtttttcgcctgttcgagcacggcggtccagttcaccggctcgatcagcttgacccgcacgcccaggcggtcctggatcaggcgcacatagtcggcggccaggccttggtagcggccattttcatcacggtattcaaagggtggccaggaagcgtccacccccaggcgcagctcttgatggtccgacagccagccacgctcatcatcagtaagagtcaacgcgccagccgttgcggtccaggtcagcagcgacagcagtaacacggtcggcagtctgggcataacggtctcgttatggcacggggaatgtttcgagtgtagacgggcattgcggggaggggaggcgcggggccattaatctatagaaagaaatccatagaaaacaaaacccccggcctgggccgggggttctggtatcactcgtcgaggaaggagcgcagatgctcgcttcgcgtcgggtggcgcaacttgcgcagcgccttggcttcgatctgacggatccgctcgcgtgtcacgtcaaactgcttaccgacttcctcgagggtgtggtcggtattcatgtcgatgccgaaacgcatgcgcagtaccttggcttcacgggcagtgaggccggacagtacgtcgcgagtcgcttctttgaggctctcaacggtagcaacatcgattggcgactgcatggtcgagtcttcgatgaagtcacccagatgggagtcttcgtcatcaccgatcggggtttccatggagatcggctctttagcgatcttcaataccttgcggattttatcctcaggcatttccatgcgttcgcccagctcttccggggtcggttcgcgacccatttcctgcagcatctgccgggaaatacggttgagcttgttgatcgtctcgatcatgtgcaccggaatacggatggtgcgggcctggtcggcgatcgagcgagtgatcgcctgacggatccaccaggtggcataagtcgagaacttgtaaccacgacggtattcgaacttgtccacagccttcatcaagccgatgttgccttcctggatcaggtcgaggaattgcagcccacggttggtgtacttcttggcgatggagatcaccagacgcaagttcgcttcaaccatctctttcttcgcgcggcgggccttggcctcaccgatcgacatgcgacggttgatgtccttgatctcggcaatcgtcagaccggtttcggtctcaagcgcggtcagcttctgctggcaacggatgatgtccggttgcaagcgaccaatggcttcggcgtatttcgccttgcctttggccagggcgtcggtccagctttcatcgacttcattgcccgggaactggcgcaggaagtcggcacgcggcatacgggcatcacgcacacacagttgcatgattgcgcgttcttgggcgcgcagacgctcaagggcactgcgaacacgctcaaccaggccttcgaattgcttcggtaccagcttgatcggcatgaacagctcggccaacgcgaccagctcggcaatcgcctgcttgttggtgcgaccgtgctttttcagcgccttgcgggtgatttccatttgatcggaaaccgcaccgaaacgctgagccgcaatgatcgggtccggaccgctttcaacttcgtcttcgtcgtcgccgctggattcagcgtcgtcgtcttcagtgtcgtcgtcggcttttgcagcctttgcatcgactggcggaggtacttcggcggctggcggcgcgatgccgtcgtccgggtcgatatagccgctcagaacgtcggacaggcggccaccttcggtggtcacgcgggtgtactcggagagaatgtggtcaaccgtgccagggaagtgcgcgatcgcgcccatcacttcacggataccctcttcgatacgcttggcgatttcgatctcgccttcgcgtgtcagcagctcgacggtacccatttcacgcatatacatgcgcacagggtcagtggtacgaccgatatcggtctccacagcagccagcgcggcagccgcttcttcagcggcagcctcgtcggtatcggcgtccgccagcataagggaatccttatctggcgcagcttcgaatacgttgatccccatgtcgttaatcatgcggatgatgtcttccacctgctctggatctgaaatatcctcaggcaggtggtcgttgacctccgcgtaagtcaggtaaccctgctcacgaccgagaacgatcaactctttgatacgagactgctgttgcgcttttccggacataacaccctatccactgaaggtcttggcgggcaaaaaacaagccgaggattatacccgagctatgacctcacacgccagctgaggtcgggtttgatgcggaaacattctgttttaagaggtcgcgcatctgttttgctatctgaatttgctcttcagccgacaatcccggctgtcttgctcttttgataagttcgtcgagggtctgcgtgtgctggacctcggataacctagtaatggtgtctaaaaactgttgttcaaggttttcgccgtcaattagccactccttttccgcgagtgctttcaacaagcggccctgttcggtgccatgccagcgcgccatcaactgaattgagtttagcttaggatttttctgaactgcctcgatcaaggcgatcagtacctgtgcataagtgttgctggcgttggcaaagtggtcggcgctctcaaccttgcccgccaattgcgggtggtggataagcgtgcgcaacgcaatgagcgttggagcttctacggcgacaggagttcgcggcgcgtaggcttcatcgcgatcgccgcgcttgccgtccttgctccagggtttcttgtcccattttttgccgccggcgccgggtttcttcggggtccactcctgctggggcgcgtaggcctcttgcggttggtggaagtcggaatagtccggcatggcgtcatagttgatgccggggtcgtaggcgggcggtgcatcctgcggtgcgctgtgtaccagctggctgacggcttcgccgctcaacccggtgatttccagcaggcgcatgcgcatcagtgatttcaagttggcgccggggactttgtcgatcagcggcgccgcgagcgtggccatgtgggccttgccttcgagggagcgcgggtcggcttcttcggtcaattgctggaagaaatagtccgccagcggttgtgcatgctggttgatgcgtgcgcggaatgcgtcggtgccttcggagcgcaccagggtatccgggtcttcgccctctggcaggaacaggaagcgcgcgcggcgcccgtcttgcaggctcgacagtgtggcttcgagcgcgcgccaggcggcgttgcggcctgcctggtcgccatcgaagcagaacagcacgctgggcaccacgcgaaacaagcgcttcatgtgttcttcgctggtggcggtgccgagtgtggccacggcgttgcgcaggccttgctgggcgagagcgatcacatccatatagccctcaaccacgatgatttcatcgaggttgcgattgttcttgcgcgcttcgaaaaggccatacagttcctggcctttatggaataccggcgtttccggcgagttcaggtacttgggtttgtcgtcgcccaatacccggccgccgaaggcgatgatgcgcccgcggctgtcgcggatcggaaacatcacgcggtcgcggaagcggtcgtagcgcttgccggtttcggcgttttccaccagcaggccggcgtcgatcatggctttttgctggagcgtatcgctgctcaagtgcttgtaaaggttgtcccagccaggcggggcaaagccgaggccgaagtcgcgggcgatttcaccggtaaggccgcgacccttcaggtattcgacggcggccttgcgctgcggatggcttttaagtgcttggcggtagaagtcggcagcggcagtcagcagtgggtagagcggcgaatcggtgggctgtcgcggtttgtgcgagcggccactttcttcgcggggcacttccatgccggcagcttttgccaggtcctcgatggcctgggggaagtccaggttgtcgtggtccatgagaaaacccagggcattgccgcccgcgccgcaaccgaagcagtaatagaactgcttgtcggggctgacgctgaatgatggggtcttctctttgtgaaacgggcagcaggcagtgtagttcttgccggcttttttcaattgcacgcgcgagctgacaacatcgacgatgtcggtgcggttcagaaggtcgtcaataaagctctggggaatcagcccggccatggcgttctcgtcatcactgcgtgtagatcggggcccgtgaggcgttcaagcgcacgtaaacagggtgcttgagcatctggcgtctgcatgggttgtcaggaagtgtatctgccgaacgttcgctgacgttaattcaaggtcagttttcgacgtggaaatgttgccccaggcatccggtcttgaccagcggttggtctcggaagctcatttaagggcacagtcgaccggttcgatcgcctggatgaagaatgagtgtgctcgtcagtagccttgttaggctcgtcagaagagacgtgcaccgctggcaaaagagccagtcctgacgtgtaaagcagttgtatcggtcgcgtgtgcggcgtcaacagtgaagcatcaagcgttatccgcaaatgccaatagcccggctgagggccgggcttggcagaagcttgctacgaacgtctgcgtattagtacagacgaacggcgcggcgctgttcgcgctgaactttcttggcgtgacgcttaacagcggctgctgctttgcgcttacgctcagaagttggcttctcgtaaaattcgcggctacgaacttcagccagtacaccggctttttcgcaggagcgcttgaaacgacgcagagctacgtcgaagggttcgttctctttaactttgacggctggcatccagagctaccttctttcattaccgggatcaacgttctcgtcgcaaaaaattcgcggctgaggtcgtcggtttttaagggttgcggatgttaacccctcattgcccggaatgcaaagcctctgatcgaaaaccgctagtcgggagggggactggcgactattatgcgcgccttcgaattcagcctctacaaggcgcaaacccatgctagtactgggacttgaaacctcctgcgacgaaaccggtgtcgcactttacgacagtgaacgcgggcttttggccgatgcactgttcagtcagatcgacctgcaccgcgcttatggcggtgtggtgccggagctggcgagccgcgatcacgtcaagcgcatgctgccgttgattcgtcaggtgctggacgaggccggctgtgtgccgaccgagatcgacgccattgcctacaccgcaggcccaggattggtcggagccctgctggttggggcctcttgcgcccaggcactggcgtttgcctggggcattccagccctcggcgtgcaccacatggaaggccatcttttggcgcccatgctggaaaaaacaccgccagagttcccgttcgtcgctttgttggtttcgggcggtcatacgcagcttgttcaggtcgatggcatcggccaatacaccctgttgggcgaatccctggacgacgctgccggcgaagcattcgacaagactgcgaagatgatgggcctcaattatccgggcggcccggaaatcgcgcgtctggcggaaaaaggcgttgcgggccgctacaccttcccgcgcccgatgtgcgatcgcccgggtttgatgttcagcttcagcggcttgaaaacctcggcgttgaacacctggcagcagagcgtcagcgccggggacgacagtgaacaagcccgttgcgacatcgcgctggcgttccagcaggccgtggtggagactttgaccatcaagtgcaagcgcgcccttaagcaagcgggcatgaagcgcctggtgatcgctggcggcgtcagcgccaacaaggccttgcgcgtttcgctggagaaaatgctcggcgacatgaagggcgatgtgttctacgcccgccctgaattctgcaccgacaacggcgcgatgatcgcttatgccggttgccagcgtttgcaggctgggcagcacgaaagcctggcgatcagcgtgcaggcacgttggccaatggagcaattgtcgccactgtaagccgggcttatggacggtatttaaaaatgccgttcgcgcccggcaaacaggtcgcgtaaattgccgcggtggcgccagacgatcagcagtgtcagcacgctcatcggcaacagcgccgccggttcctgccaggccagcagtggcagggtcagcggagtggcgatcagcgcggctaatgagctggtgcgggtcaggtagaacgtcagcagccaggccagcacggccagcagcgcggccggagggtaaatccccagcagcatgccggcggccgtggcgacacctttgccaccgcgaaagcggaagtacaacggaaacagatggccgaggacggcgcacacgcccacccaggcctgctgttgcagggtaagaccggcgaggctggcgatcagtacgggcaacaagcccttgcagacatcaccgagcagcgtcagcacggcgagttttttgccggccaggcgcaacatattggtggcaccggcattgcctgaaccactcattcgcgggtcggggtttcccgtcaggcggctgagcaaaatggcgaaggacagcgagccgagcaggtaggcgaaaatcgccagtgaccaaaacatgctaactattccgggcgaggacgccctgattctaacggggcattgcgcccttgtcgtgctgcggagaagagtgcttggacagagtgtttatcgaaggcctggaagtcgacaccgtgatcggggcctacgactgggagcgcggcatcaagcaatgcctgcgcctggacctgagcttcgcctgggacaaccgtccggccgcggccggtgacgacctgaccctggcgctggattacgccagtgtatccacgcgtatccaggcctttgccgagcagtcccagtaccaactggtggaaaccttcgccgagcgcttggctgaagtgctgatgagcgaattccagattccctggatgcacctcaaactgaccaaacctggcgcggtaccggccgccagaggtgtgggcgtggagatcgagcgcggatgtcgctaactcaggtttaccttggccttggcagcaatatcgagcgcgagccccacttgcgcgcgggtctggatgcgctggcgagctttttgacagatgtgcgctgttcgcctgtgttcgaaagccagccggtgggcatcaagagcgggccgttcttcaacttggtggtgtcggcctggaccgacctgccgttgatggagctggatcgtcgtttgaaattcatcgaggccgacaatggccgttacgccccggaccgcaaaggcttgccgttggacatcgacgtgctgctgtatggcgattgggtggggaatttcgacgggctgatcctgccgcgtgctgaaattctgaaaaacgcgtttgtgctgtggccgctgtcgctgatggcgccagaccgcgtgcatcccgaggcggccaagagtctggctgatctttggcgtgatgcgcagatcgatcaagtgctggcgcctgtgggctttgagtggcagggccagcaactgactccgctgaatctcctgtagccgccgattctcctggcttgaccggattcaactgtgggagcgggcttgcccgcgatagcggtgtatcagccaacatcaatgtttgctgggtgcacgtcttcgcgggcaagcccgctcccacaggttttgcgctcaactgaacagcattggaacagcttgccggctaggcgccgcgctgttccttgtaggctttcagtgccttgagccgttcgcgcttgagcgcttcgcccagctccgggcctttgaaccctttctccagcagcggcgtcactgcgacttcacgggcgatcttggcagcaccgcgcaaataatcggcctgtggataacttcgctgttcaaaacccttgcggccacgcgcatccatttcgcatgccaccacaaattcttcaaagcgctgcggccggcggtatacgtcaaagctttgcagcaactccagcaatgtggaggctttcagctcaagcgcacgatggccatgggtgtggtattggcccaccaacagcgccaggtcctggcaatccttcggcactttgaagcgctcattgacggccttgatcagcttcaaacccgtgtgttcgtgggcgatatgctgcggccacttatccacaggtgtcaggcccttgcccaagtcatgcagcaggcaggcccagcgcacggtcagcggttgatggtgcaaggccgcttgctccagcacactcagggtgtgcacgccggtgtcgatctcggggtgatgggcctcgggttgcggcacgccgaacagagcattcacttccggcatcagggttttcagcgcatcgcagtcgcgtaacacctggataaatacctggggctggttttccatcagcgcccgggagatttccttccagctgcgttccggcgtcagggcttgcagttcgccggattcactgagttggcgcatcagctccaacgtttgcggtgcgacggtaaatcccaggtgggcgtagcgtgcagcaaagcgtgcaacgcgcagcacacggagcggatcttcggcgaatgcgggggaaacgtggcgaagaacgcgggccttaaggtcacgctggccatggtaagggtcggtcagattgccgtcatcatcctcagccattgcgttgatggtcaggtcgcgcctaatcaggtcttcttccagcgtgacgtccgggctggcgtgaaacacaaagccgccataaccccggccgctcttgcgctctgtgcgggcgagggcgtattcgtcaccgtttttcgggtccagaaataccgggaagtcagaacctacaggcttgtagcccttggccagcatttcttcggcagtcgcaccgacgacgacacggtcgacatcggtgacctcgatgcccagcaagcggtcacgcaccgcgccaccgactttgtagattttcatgaaaaagcctccattagcggcacaggataccgcctgcgcctggccagtggaggctttgctgtttcagagatgaacgacggcgaggtccaggcggccgtagtcgttgtcgttgtggtcggtacgtggtggtacatggtgggttttcatcacttggtcgccctgcagggtttccagatggatatcgaacccccacagccgatgcaggtgcttgagcacttcctcggtggattcgcccaacggcttgcggtcgtgctgctgatgacgcagggtcagggagcggtcgccgcgcacatcgatgctgtagatctgcacgttgggttcacggttacccaggttgtactgcgccgccagggtttcgcggatggtgcggtagccgggttcgtcgtggatggcaggcaccaccaggtcgtccttgaggtcgtcatccatgatgctgaacagcttgaggtcgcgaatcacctggggtgacagatactgcaggatgaaactctcatccttgaagctgctcatggcgaacttgatggtcgacagccaatcactgccggcgatttccgggaaccagcggcggtcttcttcggtggggtgttcacacatgcgccgaatgtcgcggtacatggcaaagcctagcgcgtaggggttgatgccgctgtaatacgggctgtcaaagccaggctggaacaccacgctggtgtgggacgtgaggaattccatcatgaagccgtcggtgaccaggccctcgtcatacaggtcattcatcaaggtgtagtgccagaacgtcgcccaaccttcgttcatgacctgggtttggcgctgtgggtaaaaatactgggcgatcttgcgcacgatgcgcacgatttcccgttgccaaggctccagcagcggtgcgtgtttttccaggaagtacaggatgttttcctgaggttcggcggggaagcgcgcattgtccttgtcgctgtttttgccggcttttttcggaattgtgcgccacaggtcgttgatctgtttctgcaggtgctcctcgcgctccttctggcgcaggcgttcttcctcggcggaaatcgggtaagggcgtttgtagcgatcaaccccgtaattcattaacgcgtggcaggaatccagcaagtcctccaccgcgtcgatgccgtggcgctcctcgcactgcatgatgtactgcttggcgaacaccaggtaatcaatgatcgagctggcatcggtccaggtgcggaacaggtagttacccttgaagaagctgttgtgcccgtagcacgcgtgcgccaccaccagcgcttgcatgcagatggtgttttcttccatcaggtaggcgatgcacgggtcagagttgatgacgatctcgtaggccaggcccatctggccacgggtgtaggacttttcggtgctcaggaaatgcttgccgtaggaccaatggtggtagcccagtggcatgcccaccgaggcgtaggcatccatcatctgttcggcggtgatcacttcgatctggttgggataggtgtccagggcatagcccgccgcgatgcggctgatttcccggtcataggcctggatcagttcgaaggtccattcggaccccgtggatatgggttggcgcttatgctcttttttggcggtcatgtcactaacctgcgctggaagagttcacggaagaccgggtagatatcgccggccgagaccaattgctgctgggcgaatgtgtcggcaaaggcttcgccgatgcgctcgtattcgaaccacagggcctggtgctcacggggggtaatttcgacgtaggtgtagtactgcacgaacggcatgatctggttgatcagaatgtcgcggcaaatcggcgagtcatcattccagttgtcgccgtcggaagcctgggcggcgtagatgttccattcgttggcagggtagcgctcggccatgatctcctgcatcagcttcaaggcgctggacacgatggtgccgccggtttcccgcgaatagaaaaactcttcctcgtccacctcccgggcgctggtgtgatggcggatgaaaaccacatcgatcttgtcgtaatttcgcttaaggaacagatacagcaggatgaagaagcgcttggcgatgtccttggtggcttgggtcatcgacccggacacgtccatcaggcagaacatcaccgccttggaactcgggttgggttgcttgaccagcaggttgtacttcaagtcaaaggtgtcaaggaacggtacgcggtgaatacgcgcactgagtttctctatttcggcttcgatctcctggatatcgccgaagttgtccggctcttcgcgtttcaggcgcgccagttcttccttggcttgtttcagtttggcgcggctgctgcccgacagggcgatacggcgggcgtgggccgagcgcagggtgcggatgatgttgatgcgcgacgggttgccttcgttgctgatccccgcgcgtacggtcttgaaggtgtcggtgccggtcaggttgcgtttgaccaggttgggcagttccaggtcctcgaacataaactcgagaaattcttcctgggtgatctggaacacgaactcatccatgccctcgccagaattaccggccttgcccggccctttcccgccaccgccgccttgggggcgctggatatgctcgccggtggtgaattccttgttgccggggtgcacgaccgtctgtttaccgccacggccatggtgcagcaccggttcatcgatgtcccggccaggaatgctgatttgctcgccgtgttccatgtcggtgatggaacggcggctgacggcctcttcgacggcctttttgatgtggtcacggtagcgccgcaggaaacgctggcggtttaccgtgctcttgttcttgccattgaggcgtcggtcgatcacatagctcatggggagccctccgggcagcttcacgttacaagcttcaagccgcgagctggaagcttagagacaagcggtcggctgccgggccgtgggcccggcagcgttcgcctgtcgctgccttactgtgatttacgaacccgcaggtaccattcggacagcaggcgtacctgtttgtcggtgtagccacgctcgaccattcgggtgacgaagtcgttgtgtttttgctggtcctccttgctggccttggcgttgaagctgatgaccggcagcagatcctcggtgttggagaacattttcttctcgatgaccacccgcagcttctcgtagctgagccaggtcgggttcttgccattgttgttggcccgggcgcgcagcacgaagttgacgatctcgttgcggaaatccttcggattgctgatgcccgcaggtttttcgatcttctccagctcctcgttgagggccacacggttgaggatttcgccggtttccgggtcgcggtattcctggtcctgaatccagaaatcggcgtacagcacgtagcggtcgaagatgttctggccgtactcgctgtaggattccaggtacgcagtctggatttccttgccgatgaactcgatgtagcgcggtgccaggtattccttgaggaagcgcaggtagcgctcgcgggtttcggcctggaactgctcctgttcgatctgctgttccagcacataaagcagatgcaccgggttggcggcgatttcgtgcgggtcgaagttgaagaccttggacaggatcttgaacgcaaagcgcgtcgacaggccgttcatgccctcgtccacgcccgccgtgtcgcggtattcctggatcgatttggcttttgggtcggtgtccttgaggttttcgccgtcgtacacgcgcatcttcgaatagatattcgagttttccggctccttgaggcgcgacagcacagtgaactgggcgagcatcttcagggtgtcaggcgcgcagtgggccttggccagggagctgttgaacagcagcttgtcgtaaatcttgatctcgtcgctgacccgcaggcagtacggcaccttgacgatgtagatccggtcgatgaaggcttcgttgttcttgttgttgcggaaggtgtgccattccgattcgttggagtgagccagcaggatcccggtgaacggaatcgcgcccaggccttcggtactgttgtagttgccttcttgggtggccgtgagcagtgggtgcagcaccttgatcggcgccttgaacatctccacgaactccatcaggccctggttggcccggcacagggcgcccgagtagctgtaggcgtcggcgtcgttctgcgggaattcttcgagcttgcggatatcgaccttgccgacgagggccgaaatatcctggttgttctcatcgcccggctcggtcttggccacgccaatctggttaaggatcgacgggtagagtttcaccacgcggaactggctgatgtcgccgccgaactccgacaggcgcttggtcgcccagggcgacatgatggtattgaggtagcgtcttgggatgccgaagtcttcttcgaggatcgcgccatcttccgtggcgttgaacagccccaaaggcgactcgaagaccggtgagcccttgatcgcgtagaagggcaccttctcgatcagttgtttgagtttttcggccagggacgatttaccaccgccaacagggccaagcagataaagaatctgtttcttctcttccaggccttgggcggcatggcggaagtaggagacgatctggtcgatgcattcttccatgccatggaagtcttcaaaggccgggtagcgccggatcaccttgttggagaatattcgcgacaggcgcgagttgttcgaggtgtctaccagctccggctcgccgatcgccagcagcaggcgttcggcggcagacgcgtaagtgctgcggtcctttttgcacagctcaagatactcctgcaacgtgagttcttcctgctgtgtggactcgaagcgttgttggaagtggctaaagatactcatgacgtcgtcacctcgctcgatacgtggagccgacgccggatcaatcagtcgatgctggcagccatcagcgatcgccaatggccgttttccccccagaacaccctgaaacgctaccgatgacccgcacgccggtgtaccggctctcccctgattcggatggcctgcgcttaaggatagttcggaatcggggaggtcaaggcgggatacgtaattagtttggctgcgccgttcgtcagaaacggcgcgagcccaagcgtcacgcgggatagcggggtgtgaaaaaaattattgcgaatcgcccgaagtaatttccgcaggataagtcgtacgccacagttcgaagccgccgtccaggctatagacgtcgctgaagccctggctgatcaaataggccgccgcgctctggctggagttgccgtggtagcaggccacgatgaccggcgcgtcgaggtcggcggcgcggatgaaatcggcaatgttgtggttgtccaggtgctgcgcacctttgatgtggcctgctgcgtaggcttgggggtcacgaatgtccaccacgactgcggcttgctcgcgcagggcctgggcttgttggggagggatgcgtttgaattcgctcatgggaggctcctagggcttggcggcagccggctgtgtggcagaaagaggggaatcacactggcagctcaggcgctcgccggtgtcgatgttcatcagggtcatgctgccaccccacacgcaaccggtgtcgagggcgaacacgccaggttcgtcgcatttgccttccagggctgcccaatggccgaagatgatcttcgtgtcacgggtcttgcgctccttgtgggcaaaccagggtttataacccggcagcgcggtgtcggcgccttccttgctcttgaggtccagtttgccctcggcggtacagaagcgcatgcgcgtgaagtagttggtgatcacgcgcaggcgggtcacgccggtgaggtcgttgtcccatttcaccggctcgttgccgtacatgccgtcgaggtaggcggtgtagaggttatcgtcggccagggcgccttcgacttcggcggcgcacttgagggctttcttcaaagtccattgtggtggaatgccagcatggacaagggcaacgctgcggccttcgtcgtaatgcatgagcttttgccgacgcagccagtccagcagttgggcgcggtcaggggcttcgaggatttccctcagcgtgtcgccctttttcagccgctcgatgttattgcccgccgccagcagatgcaggtcatggttgccgagcacgcacaccagagaatcgcgcatcttataaaggaagcgcagggtttccagggactcggggccacggttgaccaggtcaccgaccagccacagacggtcttttacggggtcgaaggccacacgctcaagcaggcatttgagcggctccaggcagccttgcaggtcgccgaccgcatacgttgccatcagtgcagggctcccggcactgcaaggcggaacggcgcgatgatggcatcgaacagttttccgtcgctcgccttcatttgatacgagccctgcatggtgccgaccttggaggtcatcaccgtgccgctgctgtaggtgtggctggcgccgatatcgatcagcggttgttgaccgaccacgcccgcgccgcggacttcttcgacctggccgtcaccgtcggtgatcacccagtggcgcgacaacagcttggccggcaccagcccgttgttctttacggtgatggtgtaggcgaaggcgaagcggttctggtcaggttgcgattggtccgcgaggaagcgggtgacgacgctgacgtcgatctggtagcggggatcggacatgcaagagaccttaaaagcaaagcgcaggacagcagatgcgggtcagtctaggccaagaggcgggcactaggccagacatgtgtctggctcttgggcgcaatggcctggcgagcgctttcagtatgacgcaggaaaaatgtgggagcgggcttgcccgcgatggcggtgggtcagtcaatggtatatcgactgatagtccgctatcgcgggcaagcccgctcccacagaattttattcggctgttggcgcaggctggatggcaagctggtcagccaggcgaacgaatgcggcgaggtccagttgctcggggcgcaggccgccgtcgacgccagcggcttcgatttcagcgttgctcagcaaggctttgagcgtgttgcgcagggttttgcggcgttggttgaatgcttcgcgcaccacgcgttccagcaacttgtgatccttggctggatgcggcaacacggcgtgcgggaccaggcgcacgatggccgaatcgaccttcggcggtgggttgaacgcgccagggccgacgttgaacaggtgttccacgcggcaatggtactgaaccatgatcgacagacggccccagtcacccccacctgggcctgcggccaagcgctcgaccacttccttttgcagcatgaagtgcatgtcgcggatgatcccggcgttgttcagcaggtggaaaatcagcggcgtggagatgttgtagggcaggttgccgaccacccgcaggctgttcggcgccgcattcaggctgttgaagtcgaacttcagtgcatcaccctggtgcagcttgaagttcgagtgaccggcgaactgctggttgaggatcgggatcaggtccttgtccagctcaaccacatccagttggccgccgctgttgagcaggcctttggtcagcgcgccctggcccgggccgatttccagcaagcgatcttcaggcttggcatggatggagcgcaggatacggtcgatcacgccagcgtcgtgcaggaagttttgcccgaagcgcttgcgcgcccggtgttggtattgctcggtcatatacgggtctcggccatctgataggcggtttccagggccacgtggaggctgccggtatcgatcttgccgctgcccgccaagtccagggctgtgccatggtcgacggaagtacggatgatcggcaggcccagtgtcacgttgactgcagcgccgaagcctttgtacttcagcacgggcagcccctggtcgtggtacatcgccagcactgcgtcgcagtgctccagatatttgggggtaaacagagtgtctgcaggcagtgggcctcgcaggtccatgccttcttggcgcaggcgctctaatgtcggttcaatgatgtcgatttcttcatggcccaagtggccgccttcaccggcgtgggggttgagcccgcagaccaggatgcgcggttgggcgatgccgaacttttgttgcaggtcggcgtgcaggatacgcgtcacgcgctccacgcgttcggcggtgatggcatctgcgatgtcgcgcaacggcaggtgcgtggtcaccagtgcgacgcgcaggccgcgtgtggcgagcatcatcacgacctgagcggtgtgcgtcagctcggcaaggaattcggtatgcccggaaaaggctatgccggattcgttgatcacacctttgtgcacgggggcggtgatcatgccggcgaagtcgccgtcgatgcagccttgcccggcgcgggtcagggtttccagcacgaaggccgcattggccttgtccagtttcccggcaaccaccttggccgcaagcggggtgtcccacacgtagaggctgcctgcggaagcaggcgagtcgggccagtagcccggcgccacgtccagcaagttgacagccacacccagttgcgcggcccgctcaaggagcaggttgcggctggtaatggcaatcagggggtgtggctgaggttgcgaggcgagcagcaggcacaggtctggaccaatgccggccggctcgccgggtgttaacgcgaaacgctggggtttcactgggctgcctgatcggcgcctgtttgctcggcggcgggcagcttgttttctacgtaggcttcgtcgcgaatctgacgcaaccaggtctgcagctcttcgtcgtatttgcggttgcgcagtacggtcagtgcttgctgctcacgggcttgagtggtgttgtcagtggcgcggcggccaaggacttccagcacatgccagccgtattgggtcttgaacggcttggacagaacgccttgcggtgtcttggccatgacgtcctggaactccggcaccaaggctttcgggtcgatccagttcaggtcgccgccgttgagggccgaacccgggtcttccgagaagctcttggccagggtggcgaaatcttcaccgccttcgatgcggtcatagatcttctgggccagttccttggtttgcgcttcggtgcggatttcgcttggtttgaccaggatgtgacgaacatgaacttcgtctttcagcgaggtctcgccaccgcgtttgcccaacagcttgaggataatgaagccacccggggtgcgagcgggctgagtaatgccgcccacttccatggcactcaactcgcggtcaaacggaggtggcaattgagcggctttacgccagcccatgtcgccgccgtccagagcgttgtcactgccggatacggcaatggcggtctgggcgaagtctgcaccggctttcaggcggtcataaaccgcctgggttttcgcggcggcggcattgagctgctcggcgttggcgctgtccggggtagggatcaggatgttggccaggtgcagttcttcggaaagctgctgcttgccgaggtccgaggccaggaagttcttcacttcctgttctgacacctgaacgcgctcggccacgcggcgctggcgtacacggctgatgatcatttcacgcttgatctggtcacgcgcgtcctcataggacaggccgtcgtgagccagggccgcacggaactggtcaatgctcatgttgttgcgctgggcaatggtgccgacagcctggttcaactcttcgtccgaaatacggatgccggagcgctcgccgatctgcaattgcaggttctcgacgatcaggcgttccagaacctgtggttccagcacgctggtcggcggcacgccaccaccgcgcttggcgatggtttgctgaacttccttgacccgttggtccagttggctctgcatgatcacgtcgttatcgacgatggcggccactttatccagttgctgaaccgcagcgtgtgccgaaacggtacccaggaacagcgcgcccagcacgagcgggcgcagacaatcagaaagcttgatcttcacgttcacgataaccttgaatgcctttgtcgaggaagctctctaccttggcgccggtcaggccgccgagtcctttgaggacgatctggaagaagagcccgtggtcacccttttcgttcaacggggcgatctgagtgtattcgtcattggaaacccaataacggttgatcacgcgaagtttccagcagcagttgtcgtattcgaaaccaccaaaggcttccagagtacggttgcgggcgtagtcatactgccagcgggtgatcaggttccactgcggaacgatcggccacatcatcgagaagtcgtgttgctggattttgtagtaatccttgataaagtttggctggccttctgtaccgtaatcaccgccgaactgccatttgccggtcagttggttgtagaccacctggtcgttacgatagcgataaccgaggttgatgatcttgttcgggttgtcttccggctggtagtgcagcatcgcactgcccgaacgcgtgctgtgctcttcggtatcccagttaaagtcggccgtggcacgccagtcgcggttgtagcggtattcgtattccagggccacaggcgacacatcggactgtgcgtcggcacggtcggaggcgagtacacccggcaattggacctggcggtccttgaagtacaccgcctggcctacggacacgcgctgacgttcgaagccattgtcttcgatccagcggctggtcacacccagggacagtttgttctcgtcgccgatccggtcgttgccgctgaagcggttatcgcgaaacagtgaggcgtagctgaacgagtactcactggtgtcgaataccgggatatcgctctggtccttgttaggcacatagagatagtaggcgcgcggctccagggtctggcgataatccttgccgaaccagttggtgttgcggtcgaagtacaggccgctatctacactggcgatcggcactgaacgactttgcgagcttttgaactcatctcctgccgcaagcgtagatttacccttgctgtccaagtcaaggtcatatttcgtgtaaacatacttgagcttgggggtaataaaaccgtaggtccaattcatcgggtattcgacggccggagcgacgttcaggcgatcaccgtttgcacgggtcaagcctgtgacgagatcatccagtcgcgtgtctccgtttggcagaggaccgccatccttatcaaaaatgttgccgcttctcagatcccgatcaaaccgaacagcctcggtctcataggtaaagttcacgccacccgggtgatacggcagcatcccgttgaaggtgatctgcggcagacggtcatacggggtgatctgcgaaatcgtcgccaactggaaagcttgcaggttcagacgtgcctggtaggagtcgccgcgataggtcacggagccctgctggttgacgtagtcctgagtctggataccttcctgataggacttcagatcctgatagtagaaaggatcgctgatcttggtgtagtcgacctgggtcgcaatgcgcgaatccagcccgcctttgtgctgccagttgagcatgtaacgggttttttcggagtcggtctgtttttcccgctcgttgctgtcgtcgttcaggtacgcgccgccgaactggccttcgctggacttggtgaggtagcggaattcgccttccatcaacaggccgcgcttggtcatgtactgcgggtacaacgtggcatcgtagttcggtgccaggttgaagtagtacggtgtcaccagcgtgaagccggtttcgctgccggtgctgaagcttggcggcaggaagccggactgacgacggtcgtcgatcgggaaatagatgtacggggtgtagaggatcggaatgttcttgatccgcaacgttgcgttggtggccgtaccgaaaccggtggccgggttcaacgtgatgttgttgcccttgagctgccaggcgttgctgtccggctcacaggtggtatacgtaccgtccttgagacggatgatcgcgttttcagcacgcttggcgtacagcgcgttaccgcgaatgcgcgacttgtgcatgacgtattcggcgttgtcgatctgggctgcgccggtatcgagctggacctgggcgtggtcgccgacgatcagggcaccgttgtcgcgcagacggacatcgccgttcagctcgccacggttctcggcctgatacaggctggcttcctgagcctccagctgcatgctgccctggcgcatgacaacgtcaccggccagggttgcgacctgctgttcctgctcgtaacgggaaaccttggcgccgataaaggtcggcgagtcgctcttgtccgtcttgtcgttcatgcccggacgttgcggctcgatatacgcgccggagcaatacgggccggtttcagccagttgcgctgcagtcagcttgtcgcgaggcacccagtccaggtggctgtagtcggcgctgcgcgaacgcaggccgcggcccttggattcggtgaccagaacgggtttcggctcgcccgtggcgctgccgccggcattggcctgggccgtgctgccggcatcgctgatggctgcaccgtcatgcaccgggcgcggtggtaatggggcggcggcggttttcggcgcgcaatcccaggcacccgaagcagagactgagcagtcatactgttccgcggcgaccacgaatgaggtggcgaaaggttgcatggccagcagactgccggttaccagcaacggaaattttctacgaaacgcgggggatttcaatgccatcttattagtccgggcttcctgcgtgccatctgcccgcggtgtgggccgcacgcctctcgatggtctgaaaaagatgcgtgataataaagcatgacccgcttgacggctagcgccgtcggagacccttgtaatgcccgagcaagatctacgtttacaacagctgcaagtctggctggatgagcagttgccgatccttttcaacgctcaaggctggggtgccgtacccccggccacattgaccgcggccagtagcgacgcgagtttcaggcgttacttccggtgggagggaggcggtcaatctttcgtcgtcatggacgcgccgcccccccaggaaaactgcaaacctttcgtcgatatcgccgatttactcgcgaaatcgggaattaatgtgccaaaaatttatgcagaagatttgccgcgcggctttcttttgctcaatgacctgggcagaaaaacctatctggacgtgattgacgagcaaaacgccgatcaattgtttgccgatgccatcgactcactgctggcttttcagcaattgccgatggacgcgccactgcccagctatgatgtcgccctgttgcgccgtgagctggaattgtttccggagtggtacgtgcgccggcatttgggtatcgagttcgataccggacagcaggccctctggcagcgcgtcagcgatcacttgatcgacagcgccctggcccaacccaaagtgctggtgcatcgtgactatatgccgcgcaacctgatgatcagcgagccgaaccccggcgtgctggatttccaggacgcggtctacggcccggtcacctatgacatcacttgcctgttcaaggatgcgttcctcagctggccaaaggcgcgcgtacgggattggcagcgcggctattgggagcgcgccgggcaactgggcatccccgtgcaagctgattatgaagagttcctgcgggccagtgacctgatgggcgtgcagcgtcacctcaaggtgatcggcatcttcgcgcgcatttgccaccgcgacggcaagccgcgctacctggcagacgtgccgcgcttctttgcttatatagaagcggtgctcgcagatcgtcccgagttgaatgaactgggcgagctgctggccagcctgcgccaacccgccgaggcgacggtatgaaagcgatgatcctggcggcgggcaagggcgagcgcatgcgcccgttgaccttgcacacccccaagcctctggtgcaggccggtggcaagcgcttgatcgagtaccacctggaggcgctggccaaagccggcttcaccgatatcgtgatcaaccacgcctggctgggccagcaaattgaaagttacctgggcgacggtgcgcagtttggtctgcgcattcaatactcgcccgagggagaaccgctggaaaccggcggcgggattttcaaggcgctgccgttgctgggggacgaaccgttcctgttggtcaatggtgacatctggaccgactacgactttgcccgattgcaccagccaatccagggcctggcccatctggtgatggtcgacaacccggcgcatcaccccagtggtggcgatttctacctcgatcaaggtttgcttcatgatgccgcgcccggtgccgataacctgaccttcagtggcatttctgtgctcgacccccagttgttcgcgggttgcagtgccggtgccttcaagctggcgccgttgctgcgcacagccatggccaaaggcctggtaacgggagaacacatgacgggacgttgggttgacgtgggtacgcttgaacgcctggcgcaggttgaagccctgctgactgcggggcaataggatgttgtggccagggacgctgatcggcgccggggctggctttgccattgccagtattccaggggccttgttgggtgcattgctggggcaggcgctggaccgccgcctgcagttgcaaagctgggcgcaattgcgcgagcgcctgggcggtcgcccggcgttgcgcaacgatgagttgctgtttgtgctgctggggcgtctggccaaaagcaatggccgggtcgtggacgggcatatccagcaggcgcgccaggaaatgcgctcgctggatatgacggattcggcccagcgtcgggcaatcgccgccttcaatcgtggcaagtccggtgctgaccgtgtgcgcacttatttgcgcgtactcaaggcccaaccccacgccgccgaaggcgtgttgcgcgcgtgctggcgtatggcctgggcggacgggcgtgcggatgacgctgagcgcgatttgatcgagctgtggggcaagtggttgggctggacgccgcaacagctcaaggcgctggcatcggattatgttcaggagcgcaagccgctggccaatcgggccggcgcctatcaggatgcgttgcgcattttgggcgtgacgaccaccactgagccgtcagtgatcaagcgcgcctaccgccgcctgctcagccgccaccacccggacaagattgccggcagtggtgccagccccgcgcaggtacgcgaggccaccgagcgaacccgcgagttgcataacgcctatgcgttgattcgtgagcggcgcgattttcggtagttatcccggtttcgatatgaaaaccacaatcccctgtgggagctggcttgcctgcgatagcggacttcaagtcactaatgcttcgctgacccaccgcaatcgcaggcaagccagctcccacatttgattgggttatcaggccaggctcactcagtggcctgcgggctcaaccacccgcgaatccgccgatacagctgctcctgctcggccgaactgttgccgggcactgtcttgagcgacacctgcttatagccctcattcttcccgcgtttggccgcctggctccgcgccagcgcatttttgcgttccagatcgccatcttgatagaacacatccgccgtcggcactttcagcgccggcgccagttgttgcaggtccggttggcgccccgccggggttttgccggccaccatcaccagtttctgcacctgggccggttgcttttcggtcaggtagcgtgccgcccaccaggcaccagtgccatggccgagcagcaccacactgcgcgcgctctgggtctgggcgaaagccacggctgcgtcgatgcggtcgaaaatgcgcttggcgtcggttttgtcctgttcatccgcgcctggcaccaccgccgggtcagtgccttcggcttcggcgctggctgcttgctcgatgggtttggcggcggtgctgccgtctttgctgctggtgtcgacggccgctttgggcggttccatgacgcgcggtggcagcgtgtccatgttcacatccggtaacgaaaggctgagggtgccccaattggcgtccggcaatttgttgcgcaatggtgcgattgcttgcggccagtcagcactttccccggcgcccggcacaataatcaccacaccttcgggctcggcgctgttggccggtttccacaaggccaggaatgaatcgctgccggcttgcaattgttgctgttcgtgttgcggtatctggcgttccagggcatttgcttcttgcgcgctgcgctcgggcagggcttggcgctcaaccggtttttcggcagcgggcgcgggtgcgtcggcggcgtggacagaaaaggcgctggtaaatagcagcgacaggcacaatgctggcagtgccgaacggtgagaaaagggcatcgttaattcccggccagaagtgattccagcagcctaatgggttggtcagtatttgtcagtgatgtgagacgtggatcatgggttttcgctgtctgctggttatcggctgcatgtgctttgccttgatggcagcggccgcgcctgcgcctgccgtgccacaggcgcaactgaatgcgcaacagcgtgaatggctggggcagcacccggagctgcgcgtgggtgtggtgttgcaggcgccgtacgcgcaatacgaccggcgcctgcagcggttgtccggggccaacgtggaattgatgcagtggttggccaaggcgttgaatattgaactgttgtggcgcaacttccccagccaggaacaactggaggccgccgtacgcgatggcgaggtggacatcgcccccggcctgcaacaaacccccgccggcctgcgtctgtggttattcaccgacccttatatgcgcgtgccccagcacatcatcggcattcgcgaaggcggcggtgcggtggagctggaaaaactcgacgaacaatcccgcgttgccgtgcgcatgcccagtgccgtggccgattacctgcgcagtacctaccccaatttgaacctgcaaggcgtgcccatggagcgccaggccctgcaattgctggtgagccagcaggcacgctacgcggtggtcgacgaagcgcagctgagccggctgtcaggcgaggcggagtttgccgggctggcggtggtgggcgatatcggcctgccgcagttgctgcgggtggcctcgcgccgtgagtggccggagctggcgaccatcctgcaaagcgcgttgcgcgcgataccggcccgtgatctcgatcaactgcacagccgctggctgcaacccaaatacccgcggctgacggagtcgccggggctgtggcaaaacctctgcctgttattgggcctgttcctcctcgccagcctggcggtggtggtctggcaacgtcgccagcagcgcgtgctcgaacacagcctgctggcggctcgcgaagaaagtgccgcgcgcgccgccggggccgaagcgctgcgactgacacagttttccatcgaccaaagcaccgtgggcattctctgggtcaactgggacagccacgtgcgctacgccaaccgcgccgccgaaaccatgttgggctacacacccggcgcgttgatcgagcggcctttgatcgatttcgacccgaccttgaacatggaccgttggctcaacctgtggaagcgcgcccgcgcaagcgaagagggcccgcaaaacttcgccaccgactgcctgcgcgccgacggcagcatcctgccggccgatgtatcgttgagtttcctgcggtttgccgacggtgaatacctggtggtttacctcaatgacgtcaccgagcgccgtcgttacgtggccgcgttgctgcaaagcgaggcgcaactgcgtgaattgtccgcccacctggaaaccgtgcgcgaggaggaaaaagcgcgtattgcccgtgaagtccacgacgagcttgggcagatgctcacagtgctcaagctggaaacctcaatgtgcgagctggcctatgcgcaactcgaccccggcttgaacgaacggctgaacagcatgaagcgtttgatcgctcaactcttccagttggtgcgcgacgtggcgaccgcactgcgcccgccgattctcgacgcgggcatcgcctcggctatcgaatggcaagcccggcgtttcgaagcccgcacgcaaatcccttgcctggtgcaagtgccggagagcctgccggccctgagcgacgccaaggccatcggcctgttccggatcttgcaggaggcgctgaccaatgtgatgcgccacgcccaggcgcatactgtcgaactcaccttgaccctggaagatcaggacctgcggttgaccatcagtgatgacggtatcgggtttgtcctgggcgaagggcggccggtgtcattcggcgtggtgggcatgcgcgagcgtgtattgatgatgggcgggcagatgagcctgcacagcgaaccgggggagggcaccaccctgagcgtcacggtgccgctggatgcgtgactatagatgaggaaacccctgtgatccgtgtactggtagccgaagaccacaccatcgtgcgtgaaggcatcaagcaattgatcggcctggccaaagacctgcaagtggtgggcgaggccagcaatggcgagcaattgctcgagacgttgcgctatgtggcgtgcgaggtggtgttgctggatatctcgatgcccggagtgaatggcctggaggccattgcgcgaattcgggcgctgagcaacccgccggcgatcctggtgctgtcgatgcacgacgaagcacaaatggccgcccgcgccttgaaggtcggcgcggcggggtatgccaccaaggacagcgatccggcgctgctactcacggcgattcgcaaggtcgcggcgggcgggcgttacatcgacccggacctggccgaccgcatggtgtttgaggtcggcctgactgatacacgcccgctgcattcattgctgtccgagcgggagttctcggtattcgagcgcctggcccagggcgccaacgtcaacgatattgcccagcaactggcgctgagcagcaagaccatcagcacccataaggcgcgcttgatgcagaaactcaacatcacgtccctggccgaactggtgaagtacgccatggagcacaagctgctttaggcatcgcttcatcgcggatcaaggcgccagccgtaaaaaccagtgctgtgccaggtttttgccgatgagcccgcggtgcacatccacaaggccctggttgccggaggacttggccagcaacgagaaatagctttccttgcgctgctggaccgttttcaaatgcgcgacggtgtaggactgtttcgccgtattggcgttgggatagtgaaaatgggcataccacaacagggcgccggtacgatcattgactgcgtattcctggatgaagtctttgcgttcgccgcgcattggcttgcgatcacccagcttggcgacctgtaccttttgcagttccaacaagtaagccaggttggcgtgggtcggtggtaaggccagagaggtcctgatgcgcagttcctggcctttgcccgtcagtgtggtggcggctttctccaagtcgtcgagcaggttctggtcggtcttcttttccagttccagagcccgttgcagttccgagaagaggtcactgtagcggttggcggcacgttgcaggctttcctctatctccacgggaaagcgcgagtctttggcgtaacgctcctcgcgcacgagaatttgatgcagctctgccaggcgccggcgggccgtcgttttgatcacgttcagcggtcgtgtcgcaggcggatgctgtgctgtcaccacttggacctcatcccatacgtcatcgtgaagtgtgtaggtggccaacaacgtcttgtcctgttcagacctgacctcgacatggcttatcgccaaatcgttgttggcggccttgaagtcgccgatcagtacgccttgcttgcgggtcttgatcacccttttttgcaggcctccttgctttagcgcgggccgtttgggtggccgggcagtgagttgggcatcgggcttgatcgcctcggccagctgccgggtggtgtcgaggtacaaggtttccactagcttctggacgcgggtgaagtacgccatgtcgatgccatcggcattgacgatggcttcgccctgcaatgcgtctaccgcctgaccgtaccgctcgttcaggctttccagggtttgcaggcggtcatcgggtgtcagctcaagacgattgagctcggcatgggtacgcacctgtgcgcccagcgggtcgaggatggccgagagttcgtcggggaagtcagccaggttcttgaacagtgaaaatttcaagctctgcaattgcaggaacctcacccccagtgcggtgacttcttcactacggtctgcggtgagggttttgtattcgtctgcgccaggcgagcccaattcggcgagttcctgaaggtagcggtcctgacggtcgagggcttgtatttgtcgctcgttgatttcgatcagttgtcgggtgaacggcgcgtagcggtctttgtgagtcaggatctggcgggccgtctgttcggtctggataaagaactccgggtgtgccgcgcacaagtccaaacggtcttcgctggccaggtgtgacgatttgcggacgtttttgatggcgttgctcaggaaaatcgccacggtctttggtgttacgggaatgtgtagttcgcgacgctctttgagcgagtccaatagttgttggtaacgctgggtctgggcattcagcgccgcgtcgaaggtgcgccgcgtagcgacattgttggcggcatccatcgcgcgatgtgcgcggtcggcagcatcttgtaaggactgctggtcttgaatcaattgagtaaattccgtcgtcagctgagcctttctctcggccttggcctggcgcgcggcctcaatccggctgagaggcatgccaccgtgcagccgcaggttcaagtccaatgaccaatgcccttcgccgtccgttttaagccaagggcctgaagtactaccttccgtgggcaaaacgatcacgacgcggttgtccggccgcatttcaattcgataccaatggccatcgacctgtgcgtagcggttgccgttcatctcgtacagccctttgcccggcccgcttgccatcgccggcggcaggtcattggggcggggtacctggaagctcgccaagcgttcggcctggccgggcgtgagccgatcacgggcgcttgaaaagctgaagtcgaaggtcgtgccatgaacgccggttgcttctgggtcgagtgtcacgctgccttcgcggacttgcgccgggagcggttcgggccactgcccgggggcgcgccgcgagcccggcggttgccatgcctggatatcctggcccaagggtgttggcgggcgggtagtggcagacggtagctggagcaagagcatgccgacgttcatcaacaggtcgaccaatgccagctctcgggtgatcgggttcgggctgttgagtgccggaatgtcgtggctggcgctgttcatcagtgagatcagccaaccggtgagcatcatggggccgcgcagaaagggctgcaaaagcgtgctgaacagcaggttcgcgccctccatgaatacggcccaacggctttcgtggttggacaccgaatcgcggtccgcctggtcgaccaatgcccgagcgttgctgccgtagaggtattgcatcagtttgccgttggtaaggctcagctgcagctcgctgcccgtttcgtcgacggcaagcgtggcgggctggggtttttcgacgtaaccgaaatcgcttccgcgaccgaaccttacgtagtggggctctttgaacccgccgttgtcataaatgggcctggcactgtcggacagccatgtcagaacgctggtttgcaattctcccggttcagccagtgcttgcagcagctgcgggcgcgtggtgaattcctgcaaaggctccgcgtacaggggccggtaaagcagatgcggaccgacatgggtgtcctgcgcctcgatgatgaacatgttggcgacggtatcggcgttggcgccggctttgcgtatcagtgccaattcacgcatgaccacgggctgaccatcgacttggcggtcttggacgcgagcactcagtaatgcacagacacagcgcacacctcgctcggtcaaaccgttttgccctcggagtttgagttccagggccagcaatggcagttgtgcggtggtctggtcggcgaagcgcgtttcgcgctccgggatcaggctgtcatcactgagcagctgttgcctgagcatgtcggggtaggttttgccgatatccacggtttcgatcaggccgtcagtgtgtgtgatgtagctcggggtcagccagtcaggcagcgccaggcctgttctgtggctgatggtcgtcagggttcccggttgcccggccaggttggcaatcgccagatccaccaggttcaaggttatgcgttgggtcacgcccacggcgcccggcaagcccgcggcgttgatgaaggtcagttgcaggtcttcgggcagaaactcgtgggcccttgagtgttcggcgttgaccccgcccagccttgcttcgtcgagcttgagttggctgtgcaaagcttctgtggcgaagctgtgaatatccgcgatgtcgctgagaaacgtgtgcccgtggctacgttttttcgcgcttgccagggccaggctgtgctgtcgataggcaatccggtcggccggtgaggcgttttgcagccactcaggcaaaggttcgtgcacgttggcctgtgtcgagtatgacggtcgggccgggttgaggaagtaatagccgggatcggtgatgcgctggtaaagcgcagtgagcttttcgataccctggttggagggaatgcccagtgtttgcaggttttccaattgctcgttcagtaccgtggcggcgtggcagtcgaagatatttccaccgggttcgtaacgattgagggagatgtgctccacttcataaagcgcggccattcgctggccccatgtctggataaaggcatcgaccgaggcaaagggttcgcacacacctgtcgcgtcgcacagcagcacacttgtctggcctgcgacggagcgaaccagcagcagcgccgggcttaactgacgggttgtcagcgcgccttgcgtgtagaccagctcagggcaataagcatgcacggcatggcctgcgaacagttgcgtgcgttgttccagggtcgggtagcggacgagttgatcgatggcttcgcgttcaaggatatccagctccgcttgctcaatagcgctggattgcagggtttccttgagccggtcactgagccattgccagcggctggtaccagtgtcggccgggtcacgccagtaggcggcgagactgttttgcaacgcagcggtcagcccccagggcagttcgatgatcatctgctggatcagcgccatgtcggggaacgtgctggcggctccgggtgggctgagtttgatgatcaaggtttcatccaccaggcgcgcgctttggccgaatttgtcttgaaagtcgggcgcgttgccggtgaccagaaagtccagcatcagcgtcatcagcggcgtcaactcaagcctggcagacgcggttggaaggccgacccgtgtcaggcccggatcaagtttgattgttgggtattctttaagtatggcctcgctcaacagtcgccaggccacatccgccagtgcgggacgtgaagcgaattgggcgctgatggcctgttcgagcgagaggggcgcaaggcggttgtttgtcatgggaaatcctttttcctggatctaagagtcacgaactccagatatagcggcgcagccctggcgaatggcgttcattatgtagggctgcctgtttgcgacaggctgccgggcggtcgaacgcctgcctgtggcgcgcgcgcgtgtggacgaggcgcccacatatccggtagcgccatccgtgtagggcgatccctacccccaaccttccatccggctgatgcaattctctcccggcccccgatttccgggggctgcgccctggactacgcttgtgccacagcagtccaaaacaaaaaggtgcgggtatgagcgaggtggattcaaatgatgtgctggtcagctttcgtggcgtgcagaagagctacgacggcgagaacctgatcgtcaaagacctcaacctggaaatccgcaagggcgagttcctcaccctgctcgggccgtccgggtcgggcaagaccaccagcctgatgatgctcgccggtttcgagacgcccaccgccggggaaatcctgctggccgggcgctccatcaacaacgtgccgccgcacaagcgcgacatcggcatggtgttccagaattacgcgctgttcccgcacatgaccgtcgccgaaaacctcgcgttcccgctgtcggtgcgcggtttgagcaagaccgatatcagcgagcgggtcaaacgtgtgctgagcatggtccagctcgacgcctttgcccagcgttacccggcgcagttgtccggtggccagcaacagcgtgtggcgttggcccgcgcgctggtattcgagccgcaactggtgctgatggacgaacccctcggcgccctcgacaagcaactgcgcgaacacatgcaaatggagatcaagcacctgcatcagcgcctcggcgtgacggtggtgtacgtgacccacgaccagggcgaagccctgaccatgtccgaccgtgtggcggtgtttcaccaaggcgagatccagcagatcgccgcgccgcgcaccctctacgaagaaccgaaaaatacctttgtcgccaacttcatcggcgagaacaaccgcctcaatggccgcctgcacagccacaccggtgagcgttgcgtggtggagctggcgcgtggcgagaaggtagaggcgctggcggtaaacgtcggccaggtcggcggcccggtgacgctttctgtccgcccggagcgcgtcagccttaacggctccagcgaatcttgcgtcaaccgtttctcggggcgcgtagccgaatttatctatctgggcgaccacgtgcgtgtgcgcctggaagtctgcggcaaagccgatttttttgtgaaacaaccgattgccgagctggacccggccctggcggtcggcgacgtggtaccgattggctggcaagtcgagcacgttcgcgcactcgacccacttctagaggcgaattgatcgccccctggcttcaccaaccctgcacgtggagagaacaacaatgttgagatcccttaaatattcggccctggctatcagcttgatgggcgcgacacaggccatggcaggcccggacctgacggtcgtgtcctttggtggcgcgaacaaggcggctcaggtcaaagccttttatgcaccgtgggaaagcgcgggcaacggcaagatcgtcgccggtgaatacaacggtgaaatggccaaggtcaaagccatggtcgacaccaagagcgtgtcgtgggacttggtggaagtggagtcgccggaattgtcccgtggctgcgacgaggacatgttcgaaccgttggacccgaaactgttcggtgacaacgcgaactacgtgaaaggcgccatccagccgtgcggcgtcggcttctttgtgtggtccaccgtgttggcgtacaacgccgacaaactcaaagcaccaccaggcggctgggcagatttctgggacgtgaagcaattcccgggcaagcgcggcctgcgcaaaggcgccaagtacaccctggaattcgcactgatggccgacggcgtagcgccgaaggatgtctacaaagtgctggccggcaaagatggccaggaccgcgcgttcaagaaactcgacgaactcaaaccgtatatccaatggtgggaggcgggcgcccaaccgccgcaatacctcgcctccggtgacgtggtgatgagctccgcctacaacggccgaattgctgccgtgcagaaagaaagcaacctgaaagtggtgtggaacggcggcatttacgacttcgacgcctgggccattcctaaaggcttgccgaaagaccgcgcggaagcggcgaagaaattcatcgccttctcggtgcagccgcagcagcagaagacctactcggaaaacatcgcctacggcccggccaacacccaggccgtacccctgctggccaaggatgtgctgaaggacatgccgaccaccccggaaaacatcgccaaccaggtgcagatcgatgtgagtttctgggcggataacggcgagcagctggagcaacgcttcaacgcctgggctgccaagtaacaccgcataaccccctgtggaaaacaggcccatgtgggagctggcttgcctgcgatgcagacacctcgatgcttctgatacaccgagtcgatgccatcgcgggcaagcccggctcccacagaaagcccggctcaccgggaattcaccttggattaacggagttcaccatggtcaccgccattcctggccccaccctcaagcagcgcctggcgcgtgccgaacggctcaaccgctggaaggcccaggccctgattgcgccgctggtgctgtttttgctgttggtgttcctggtgccgatcgtcgcgctgctctacaaaagcgttggcaacccggaagtggtgggcggtttgccgcgcaccgtggtggcggtcaaggcctgggatggtcgtggcttgcccggtgagccggtgtacctggccttgagcgaggacctgggcgaggcgcgcaaaaaccagaccttgggcgatttgtccaagcgcttgaacatggaactggccggctaccgcagcctgctgaccaaaaccgcgcgggcgctgccgtttaccgaagcgccggcctcctataaagaagcgttggaaagcctcgacgagcgctggggcgacccggcgtactggcaggcgatccggcgcaataccagcacgcttacgccttactacctgctggcggcggtagaccatcgcatcgacgacctcggtgaagtggcccccgccacgccggatcaggcgatttacctcgacatcttcgcccgcacgttctggatgggcctggtgatcactttcatctgcctgctgctggcgtacccgctggcttacctgctggccaacctgccggcacgcaaaagcaacttgctgatgattctggtgctgttgccgttctggacttcgattctggtgcgggtggctgcgtggatcgtgctgctgcaatcgggtggcttgatcaacagcgcgatgatgagcctgggcctgatcgataaacctttggagctggtgttcaaccgtaccggggtctacatctcgatggtccatattctgctgccgttcatgattctgccgatctacagcgtgatgaaagggatttcgccgacttatatgcgcgcggcgatttctctgggctgccacccgttcgccagcttctggcgtgtgtacttcccgcagacctacgccggcgtgggcgccggctgcctgctcgtgttcatccttgcgattggttactacatcaccccggcgctgctcggcagcccgaacgaccagatggtcagctactttgtggccttctacaccaacaccagcatcaactggggcatggccacggcgttgggcggcttgctgctgctggccacggtgctgctgtatttgatctacaaccggctggtgggcgccagccgcctgcgcctgagctgaggagaccttgcgatgctgagcccttacatgtcgcccgttgagcgggtgtggttctacagcttgcggattctctgcggcttgatcctgttgtttttgatattgccggtgctggtgatcattccgctgtcgttcaacagcggcagttttctggtgtacccgttgcaaggcttctcgctgcattggtaccaggacttcttcgcctcggcggaatggatgcgtgcgctgaagaacagcatcatcgtcgccccagcggccaccgtgctggccatggtgtttggcacattggcggcgattggcctgacgcgcgggaatttccccggcaaggcgctggtgatggcgctggttatttcgccgatggtggtaccggtggtgatcattggcgtggccagttatctgttctttgcgccgctggggctgggcaatagctttttctcgctgatcgtggtgcatgcggtgctgggcgtgccatttgtaatcatcaccgtgtcggcaacgttgcaggggttcaaccataacctggtgcgcgcggcggccagcctgggggcatcgccgttgacagcgtttcgccgggtgaccttgccgctgattgcgcccggggttatttcaggagcgctgtttgccttcgcgacttcgttcgatgaagtggtggtgacgctgttcctcgccgggcccgaacaagccaccttgcctcggcagatgttcagtggcatccgcgagaacctcagcccgacgattgcggcagcggcgaccctgctgattgccttctcggtgctgctgttgctgaccctggaatggctgcgcgggcgcagcgaaaaactgcgtactgctcaggtctaaagccaagcgaagatcaaaatgtgggagctggcttgcctgcgatagcctcaactcggtgcaactgaatgaccgagttgcctgcatcgcaggcaagccagctcccacattgaccgtgcccactttggatcattcgggcattcagtcggtgaatgctgggcaacgctgttgcctcagctaatcttgtgccagcccatttctcaacaagaggccgcgcacatgagtacttcctcattcaagatcgcccacaaactgctgaccggcgctggcgccatcgaacagctggccgccgagctcactcgcctggatgtggacaacccgctgatcgtcaccgacgcggtgctggtcaagtccggcaccgtagcgctggcgctcgaacacttgggtgagcgcacttacgaggttttcgaccgcgtgctgcccgaccctgaaatcgccatcgtcgaggactgcatgcgtgtttaccgcgagggcgggcatgacgggctgatcggggtaggcggcggtagtgccatcgacattgccaaaagtgttgccgcctacgccggctatcacggcgcgctggcagacttgttcggcgtcgaccaggtgccgcgcaaaggcccgccgctgatcgccattcccaccacggcgggcacgggctcggaggtgaccaatgtggcaatcctttccgacaaggccgcacaactgaaaaagggcatcgtcagcgactacctgttgccggatgtcgcgctgatcagcccgcagatgaccctgacttgcccgcgcagcgtcaccgccgccagtggcgtggatgcgctggtgcacgccatcgaatcctacctgtcgctgaatgcctcgccgatcaccgacgccctggccattggcgccatcaagctgatcgccaatgcactgcccaaggcctacgccaacccggccaacctgcaggcccgcgacgacatggccaccgccagcctgatggccggcatggcattcggtaatgccggggtgggcgcggtgcatgcgctggcgtatccgctgggcgggcggttcaatatcgcccacggcgtgagcaatgcgctgttgctgccttacgtgatgcactggaacaagctggcctgcgtggagcgcatgcaggacattgctcaagccatgggggtaaatatttcaggcttgggcgtcaacgatgccgccgatcaggccgtcgacgcgatgacgcgactgtgtgccgcagtggagatcccggcaggcctgcgcagcttcggtgttcccgaggacgcgatcccggccatggccacggaggccgcgggtatcgagcggctgatgcgcaacaacccgcgcaagctcagcgcagcggatatcgagaaaatctaccgggcggcttactaaccgttgaatcaggtcacggtgcgcgcggcaaagcatgaggtatacaatgcgcgccatcgtgatttagctcaaaaaggtgcgtcatgcagcccttcgtcattgctccatcgattctctccgccgatttcgcccgcctgggtgaggaagtggacaaggttttggccgccggtgccgacttcgtgcacttcgatgtcatggacaaccactacgtgcccaacctgaccatcggcccgatggtctgcgcggcgctgcgcaagtacggcgtcaccgcccccatcgatgcgcacctgatggtcagcccggtggaccgcatcgtcggtgacttcatcgaagccggcgcgacttacatcaccttccacccggaagccacgctgcacgttgaccgcaccctgcaattgatccgcgaaggcggctgcaaggcgggcctggtgttcaacccggccaccccgctgagcgtgcttgagtacgtgatggacaaggtcgacatggtcttgctgatgagcgtcaacccgggtttcggcgggcagaagttcatcccgggtaccctgaacaagctgcgcgaagcccgcgcgctgatcgacgcctcgggccgtgatatccgcctggaaatcgacggtggggtcaacgtcaacaacatccgcgaaatcgccgcggcgggcgctgataccttcgtcgccggctcggcgatcttcaacgccccggactaccaggccgtcatcgacaagatgcgggccgaactggcgctggcgcgtccatgagcggtttcgagcagttgttccccggcaaattgccacggctggtgatgttcgatctggacggtaccttgatcgactcggtgccggacctggcggcggcggtggaccagatgctgctcaaactggggcgcccgccggtggggcctgagccggtacgcttatgggtgggcaacggcgtgcagatgcttgtgcgtcgggccctggccaatcacattgatgccgaaggggtcgatgaggtggaagccgagcacgccctggagttgttcaacgccgcctatgaagacggccacgaactgaccgtggtgtaccccggcgtgcgcgacaccctcaagtggctgcacaagcaaggcgtggaaatggccctgatcaccaacaagccggagcgctttgtcgcgccgctgttggatcagatgaagatcggccggtattttcgctggatcatcggcggcgataccttgccgcagaagaaacccgacccggcggcgctgttttttgtaatgaaaatggccaatatcccggcctcgcagtcgttgtttgtcggtgactcgcgcagtgatgtgctggcggcgaaagcggcgggcgtgcagtgcgtggccttgagttacggctacaaccatggccggccgatcgccgaagaatcaccggcgctggtcattgatgacttgcgcctgctaatccccggttgcttgggagcgggcgctgagataacgttgcccgacatcgaaccaaccccttctggaaatcccatcgtggtggtcactcgcaaactctggatgaaagtcatcaaggccctggcccgctggcgttggcgcgcctgactgatccctgccgcgctgcggcacgtttgcacatctgaccgtttgcccctcaagccacgaggcacctcatgatccgcgaagaattcctgcgtttggccgctgccggctacaaccgtattcccatggcctgcgaaaccctggccgacttcgacacgccgctgtcgatctacctgaaactggccgacgagcccaattcctatctgttggaatcggtacagggcggcgagaagtggggccgctactcgatcatcggcctgccgtgccgtacggtgctgagggtgcacgaccaccacgtgagcatcacccacgatggcgtcgagatcgaaagccacgatgttgaagacccgctggccttcgtcgaagccttcaaggcgcgctacaacgtgccgaccatcgcgggcctgccgcgcttcaacggcggcctggtcggttacttcggctacgactgcgtgcgttatgtggaaaaacgcctgggcaaatgcccgaaccccgatccgctgggtgtgccggacattctgctgatggtctccgacgcagtggtggtgttcgacaacctcgccggcaagatgcatgcgattgtcctcgccgacccgtcgcaatccgacgcgttcgaacaaggccaggccagcctcgaagccctgctggaaaaactgcgccagccgatcaccccgcgtcgtggcctggacctcagccgtccgccggcggccgacccggtgttccgctccagctttacccaaaatgactacgagcgcgcggtcgataccatcaaggaatacatcctcgccggtgactgcatgcaggtcgtaccgtcgcagcgcatgtccattgacttcaaggccgcgccgattgacctgtaccgtgcgctgcggtgcttcaacccgacgccctacatgtacttcttcaactttggcgacttccacgtggtgggcagctcgcccgaagtgctggtgcgcgtcgaagacaacctgatcaccgtgcgcccgatcgccgggactcgcccgcgtggcgcgaccgaagaagccgacctggcgctggaagaagatttgctcagcgacgacaaggaaatcgccgagcacttgatgctcatcgacctgggccgtaatgacaccggccgcgtttcggaaatcggttcggtgaagctcactgagaagatggtcatcgagcgttattccaacgtgatgcacatcgtgtccaacgtgaccggcgagctgaaggaaggcttgaccgccatggacgcgctgcgcgcgattctgccggcgggcaccttgtcgggcgcgccgaagattcgcgcgatggaaatcatcgacgagctggagccggtcaaacgtggcgtgtacggcggtgccgtggggtatttcgcctggaacggcaacatggacaccgcgattgcgatccgcacggcggtgatcaaggacggcgagctgcatgtgcaggcgggcggcgggattgtggccgattcggtgccggcgctggaatgggaagaaaccctgaacaaacgccgcgcgatgttccgtgcggtggcgctggctgagcagcccccacaaagctaaaggccgacgccggataaaaatgtgggagctggcttgtgtgggagctggcttgcctgcgatagcatcacctcggtttacctgatacaccgaggtgtctgtatcgcaggcaagccagctcccacatttgttttgtacagttctcaagaatgcatcagaagtccaggctaactcccacactgacgccttgctgagtcaggttgtcatccttcctcacgttatacgccgcccgtagcgccaactcctgagtgagcttgtggctcacgcccaggctcaatcgatccgaattgctgcgcggcgtgtagccgtccagcttgaagtcgatgcccggcacgctattgagtgaaatcttcaccttctgcgtgtcgttttcaaactcatgctcgtgggccacttcgccaaacacctgggtttgcggggtgatacggtaactgccttgcaggccgacaccgaggcgtttggagtcgcgttgctggtcatcgaaggtcagcgccgtggagcggttgtccttttccgaatagccatcgacttcaacccgcgcgtagtcggcgctgatgaacggcgacaggtgccagtcactgcccgccccggcgatgtcataacccaggcgcgcgctcaaggcccacagccagccgtcggtgtcgcctttttccgagccttcgctgacgcccagggcgaacttgcgtttgaggctgtcgaagtccagcttgccggcggtcagtgcggcgtcggcccacaggtggttttcctggtattgcgcgaacgcggtgcccatgtagctgttgagcttgtagtccgaatcgctggcgccggcttcgagggtctggcgatacaacccggcagctacgccgacacgccagttttcgtcgaggcggtagctgccgccgacgttcaggttgtaaccgctgccgtcggcgctggccgagctgctttggttatcgaagtccaggtgctggccgccaccggcgacgatggcgcgccattgcccgacggcttgccaggcgccgttgtcggcttgccactggttgcgcagttcatcctggtgagcgcgcaaagtgccttgggccatttccggcagcaaggtcagttcccacggcgccgcgagcaacgaataggcgtagtcggcgatcaggcgttgcccggcgatggtggggtgcaccgagtcgttgtaaatcagcttggtcgggtccgggttggtgccaccaatcccgtaggtcgggttggcggtgcagccgttgccgctgaaacaggtgccggtgaggttttgcccggtggccaggtcgaagcgcgccgggtcggcgaaggtttccttcagcagcagcgggatgttcagcgggataacctgggcgtcgatctgtgacaagcgctgtaccagcgcctggttgaaaatgttgctcagggccgaactcgacgcctgcagcggtgtgccgttgatggctggggtcaggcccaggtcgggcagcatccacaccatgatgtagcgcgcgccggcctgttgcagggcttgggcgctgtcggccaagcgcccgccggcggcgacggcttggccggggctgagtacgcggccttgcaggaagtcgttgccgccaccggagaggaaatacagtgcgttcggatctgcgaggccaccgttcgccggtagatagccttggcgactgcgcaataccgtgccgccaccggggttgccgggtggaatcgctgcgttggaaaccgaggtgatggagtcgaggatgttgtcggtacggtagccgcccaccgcccagttgttcccgtccggcaagccttgtgctgcgcgaaccggcgaggtggaggcattcaggtcattgggcgcgacgcccagtttcgagcccagcaaggttgatgaaaccaggccgtaatcgccctggaaggtcgggccggtgcggttggtgaagcgcaatgtggcccctttcgaaccatcagggaactggccggcgtcagccaggctgtcgccaaaaaccaccatggtcgagtagggcgaaggtgcagcaaatgcctgtgcgcaagccagtgacagcaggcagccggcgaggggcgcgaacaacggagctctaagcatgcaaaattccatttagttgtttttgtatcggaaacgaaacactgacaatgtattcaggcttttccgttaagaaaacagttttttcctataaagactctgtagcgattcccccgtattcgctgctccatattgcaccgctggcgaggctacgttactgtgccccaacgtatgaatgagaccctccccgtgttgatcatcagcaaactcttgatgcgagtagtcaaggcacacgcccgttggcgttggcgcgcctgacattttctctgccggcccggccggacctgtaccgatttgccttcttcaccctttgtttgacgccccttgccagccaacaccggcaaccggaacgtgcgtctggcagcgggtcactctcttggaaggcggtcattcgaaatcagtgaattcaagaggtttgaacccacatgttgctgatgattgataactacgattcctttacctacaacgttgtgcagtacctgggcgaactcggcgccgaggtcaaggtggtgcgcaacgatgaactgacggttgccgaaatcgccgccctgaaccccgagcgcatcgtggtttcgcccggcccgtgcacgccgaccgaggcgggcatttccctggaagccatccagtatttcgccggcaagttgccgatcctcggcgtgtgcctgggccatcagtccatcggccaggcctttggcggtgacgtagtgcgcgcgcgccaggtgatgcacggcaagaccagcccggtattccataaagacctcggcgtatttcagggtctgaacctgccggtcaccgtgacccgctaccattcgctggtggtcaagcgtgaaaccctgccggaatgcctggaactgacggcctggacccagttggaggatggctcggtcgacgagatcatgggcctgcgccacaagacactgaacattgaaggggtgcaatttcaccctgagtcgatcctgaccgagcagggctacgagctgttcgccaactttctcaagcagagcggcggcacgcgctaaggactttccatggatatcaagactgccctgagccgtatcgtcggccacctggacctgagcaccgctgaaatgagcgatgtgatgcgcgagatcatgaccggtcaatgcaccgacgcacagatcggcgcattcatgatggccatgcgcatgaagagtgagagcatcgacgaaatcgtcggcgccgtttcagtgatgcgcgaattggcggacaaggttgaactcaagaccctcgacggtgtggtcgatgtggtcggcaccggcggtgacggtgcaaatattttcaacgtttcgacggcgtcttcttttgtggttgcggctgccggctgcaccgttgccaaacacggtaaccgtgcggtctccggcaaaagcggcagtgccgacttgctggaggcggccgggatctacctgaacctgacgccagtacaagtggcgcgctgcatcgacagcgtcggcattggctttatgtttgcccagtcccaccacggcgcgatgaaacacgccgccggcccgcgcaaggacctcggcctgcgcaccctgttcaacatgctcggcccgcttacgaatccggccggtgtgaaacatcaggtggtcggtgtgttcagccaggcattgtgccggccattggccgaagtcttgcagcgcctgggcagcaagcacgtgctggtggtgcattccaaagacggtctggacgaattcagcctggccgcgccgacctttgtggcggagctgaagaatgatcaggtcaccgaatattgggtcgagcctgaagacttgggcatgaaaagccagagtttgcatggcctgtcggtggaaagcccggcggcctccctggagctgattcgcgatgccttggggcgtcgcaagaccgagaacggtcaaaaagctgcagagatgattgtactgaacgcgggcgctgcgctgtatgcggcggaccacgcctatagtcttaaagagggtgtcgccttggcccacgatgcactgcacaccggtctggctcgcgagaagctcgaagagctgggagcattcaccgcagtattcaagatggagaatgaaggatgagtgttccgaccgttctggaaaagatcctggcccgcaaggctgaagaagtggctgaacgccgcgcccgcgtcagcctggccgagctggaagcccaggcaaaactcgccgacgcaccgcgcggcttcgccaacgcgctgatcgcccaggccaaactcaagcagccggcggtgatcgctgaggtcaagaaggcttcgccgagcaaaggcgtgattcgcgagcacttcgtgccggcggagatcgccgccagctacgagaagggcggcgcgacgtgcttgtcggtgctgaccgatatcgactacttccagggttccgacctgttcctgcaacaggctcgcgctgcgtgcaagttgccggtgatccgcaaggatttcatggttgacccgtaccagatcgtcgaagcccgtgccctgggcgccgactgtgtgctgctgatcgtctccgctctggatgacgtgaagatggccgagctggcggccgtggccaaaggcgtcggtctcgacgtgctggtcgaggtgcacgacggtgatgaactggaacgcgcgctgaaaaccctcgacacaccgctggtgggggtcaacaaccgcaacctgcacaccttcgaagtcagcctggaaaacaccctcgacctgctgccgcgtattccgcgcgaccgcctggtgattaccgagagcggcatcgtcaaccgtgccgacgtggagctgatggaaatcagtggggtttactcgttcctggtgggcgagaccttcatgcgcgccgagaacccgggggcggaactgcagcgtctgttcttcccggagcgtggtgtggcggtgagtggttcgacactggattgatgtgaaagtcagccggtgtattggctgctttatgtgggagctggcttgcctgcgatagcatcacctcggtattactgatacaccgagctgatgccatcgcaggcaagccagctcccacatttgttttgtgttcattcagataggtaggtggtcgatgattcaaccagtaaggatgactgttgaagccgggcttgccgccgagcaggacctgttggccgctgtctgcgccggggatcaggattacggcctgctgttctggcagcccaacgatcaagccttggtcatgccgcgccgcttaagtcgcttgcccgcatttgacaccgccagccaggtttcggcagatgccggttggccggtattgctgcgcgaaaccggcggcgagcccgtgccgcaatcgtcggcaacggtcaatatcgctctggtctacgcccccccacgcagtgaaggcgaccaaaaccgtatcgaaaccggttacttgcgcctgtgccaaccaatctgcgacttgctgatcgagttgggcggcgacgcctcggtgggtgaaatcgacggtgcgttctgcgacggtcgctacaacgtcaatctcaacggccgcaaaatggtcggcaccgcccagcgctggcggcagagcggcggccgcccggtggggttggtgcatggcgcgttgttgctggacgatgaccgcgtggaattgatcgcggcggtcaatcgcttcaatgaagcctgtggcctcgaccagcgcgttcgcgccgatagccacattgcgctgcatgaagctttcccggcaccggatgcaatcacccggctggatgctttgtaccgtcagatgctggccagtttcctgccggcttaacgcgtaccaaacaccaccattgtcttgcctttgacgtgtaccaggttgcgttcttccaggtccttgagcacgcggccgaccatctcccgtgaacagccgacaatgcgcccgatttcctggcgtgtgactttgatctgcatgccgtccgggtgagtcatcgcgtcgggctgcttgcacagctccagcaggcagcgggccacgcggccggtcacgtcaaaaaaggccaggtcgccgactttgcgtgtggtatcgcgcaagcgctgggcaatctgaccgctcagggcgtacaggatgtcagggtcatgctgggccagttcgcgaaacttcgtatagctgatctcggcgacttcgcactcgaccttggcgcgtacccaggcgctgcgttcctgttccttgccggcctgttcgaacagccccagttccccaaaaaaatccccggtgttgagataggcgatgatcatctcgcggccgtcttcatcctcgatcaggatggtaacggagcctttgatgatgaagaacagtgtttcggaacgttcgcctgcgcaaatgatgttgtgcttggccgggtagcgccggcgttggcagtgcatcaacagtttgtcgagattcttgatcttgggtgtgggagtaagagcaaccatggttgtatcccgaaaagactgcacggtgtagttggcgttgtttttatccggcggtatcaacattgatacgcgccatacaaaggatggcaatgcgccattgaattggcgccagcttaccagacacattctgactcgatcagcgaatttgttggctaaacgcggtcattgatcgctttcatgcggggcgctacggtttgaaggccctgtgctaagctggcgacccttttttagcagtggagtctgggcgatgaaggcacgcatccaatgggcgggcgaggccatgtttctcggtgagtcgggcagtggccatgtggtcgtcatggacggcccgccggaagccgggggccgtaacctgggcgtacgcccgatggaaatgctcctgctgggcgtaggcggttgcagcaatttcgacgtcgtcagcatcctgaagaagtcccgccaggccgtggaaagctgcgaagcgttcctggaagccgagcgcgccactgaagatccaaaagtgtttaccaagatccacatgcattttgtggtgaaggggcgggctttgaaggaagctcaggtcaagcgcgccattgagctctcggcagagaaatactgctcggcctcgatcatgctcggcgcggccggtgtggcaatcacccatgattacgagattatcgagctgggttgatggcgggttcgccaatgaaaagggcgccttgagggcgcccttttttgtggttcagattcggtaagtgcttttggtcatgaccttggccaacaggctcatgccaaaccgcaccggcgccgggaaacggaaaccgccggcatccagcgcgctttctgcgtggtgctcttcatcgatgcgcatctgctcaaggatggcccgggacttttcgtcttcagccggcagttgctccagatgttcatccaggtgcttgcacacttggtgttcggtggctgccacaaaaccgaggctgaccttgtcgctgatcaggccggcggcggcgccgataccgaacgacaaaccgtaaaacagcgggttgagtacgctggggtggctgcccaactggcgtatgcgttgttcgcaccaggccagatgatcgatttcttcctcggcggcatgttccatcgcggcacgtacctgaggcagctttgcagtcagcgcctggccctggtacagcgcctgggcgcagacttcgccggtatggttgatacgcatcaggccggcgacgtggcgagtctcggtctcgctcaactgcacgtcgggctccacgatggctggcgatgggcgatacggctggccgctgaatggcaacagcgtgcgcatggccatgtcggcttgcagcaacagacggtcaattggcgagtagtgacgttgggtagtcatgctgacctccgggaagaatctcggcggccagtttaccgcaagagagggggaagcgtttgcgctgagtcaatttgcctttgtggcgagggagcaagctcccttgccacaggtaatatcagcccggcggccagttcatctgacgctgacccagtacatgcatatggatgtgataaacggtctgcccgccatcttcattgcaattcatgaccacgcgaaaacccttttcgcagccttgctctacggccaggcgctgggcagtgaacaggatatggccggccagggctttgtcttcttccgtcaggtcgttgagggtgcggatcggttttttcggaatgaccaggaaatgcaccggcgccatgggggcgatatcgtggaaggcgaggacctgatcatcttcatagatgatcttcgccggtatttcccggttgatgatcttggtgaacagagtatccacagctgtttctccattgtgaaagtacaggggaagtttacccaggcggtcaacgtgagcaataagccttgttgatggcgccagcaatcttgcgggtcagccagcgcgggctcaagcgcgggctgaaggccagccagcggttgcgccgaccgggaatgatgatggctttgtttttttccagggcacgcacggtgtggagcgcaacttcttccgggctcatcaattgtgcgctgcggtcgagcttggcggtgtccatttgcgcagtgccgaaaaacgctgtgcgggtagggccggggcagagcaccgagaccttgatgccgctggttttcaattcttcgcgcaagccttcggaaaagtgcagcacgtacgccttgctggcgtagtagctgctcatccacgggccgggctggaaggcggcaaccgatgccacgttgagaatctgcccgccgccatgcaatgccatcgcattgccgagggcatggcacatacgggtaagggccagcacgttgacttcgatcaggtcctgttcggtcatccagtcctgggccaggaacggcccgctggtgcccatgccggcgcagttaacgagcaggtcgatctgccgctcgccctcctcaagctccagcaggaacccggacaagcgcagcggttcgcccaggtcgcaggcccgaaacagcacctcgacgccaaagcgttgagtcaattcaattgcgatgctttccaactgatcacgctggcgggccaccagaatcaagctacggccgcgacgggccagggcttcggccaaagccaggccaatgccgctggaggcgccggtgatcagagcgtaacgggtcatgcctttctccatcgcaacgccgccgggcctgtgacagaggtgtcacaggcgggcgggcgtttcttcactgttttggagagtctacaggttcggctgtgtcgtcagcactttgcacttctacttcatcaacgataacgctttggtcggtgtcgtcatccgcgttgatggagctgctttcgtagctgctgtccatgttggcttcgagttggttcaggtagccgttcatgcccagtgcgaacacgatggcaaacacaatcgggaggaatgccagccacgccgtggccagaacttttaccgcagtggagttgcgcggcggaggagggccatattggttggcaccggtgttgcctggcaataccagcagcaaaagcgggaagatgctgttcaccagcggcaccaggttcaacaggtacagccagccggaccaccccagatcgtgcaggcgttgcacgccgatttgcacgctgacccacacaagcgcaacaaacaatgcaaagcccagcaacgagccaagaatgatgccagcggtcggcgaggcggtcgctacggcaaagctggcagtggaaataataccgccggccaccaacagcgcgagggtcagtaccagggtccaggccaggtagcgcagacgcccgatgcgcccgtgaatggtaaacaccttcagtgttgaaaactccgcatggctctcacccacggcagcacgcggcggtgcatagggcgaagcggcagggcgggagaagtctgaagcagcggaacccgtttcatgggtttcatccaggttgaacgccacgggctgctcttcttcgatacgggcatcaaccccggcgttcttcaaggcagtgaggtaggtttctgcatcactgcgcgagaggtcgcgtttgagtgccaccgggcggccggtgaagagcttttcgatagcggcgacatcgcttttgaacagctcggcgaggttcagcttggccgtggtgctttcgacacccgggagcaaggctccatcaaatacaatcttgaaacggttgtcgctcatgcgggcatccttgtcacttgatcaggaaggaagaatgcaggccggctcttatcggctggcctgtcggttgtcagcgtggccagtgtaactgcgcagcatgctcacgtgccttgcgatattcggcatccaggcgtgcaacgagttcatcgacgcttggcaagtcatcaatctcaccgacaccctggccggcagaccacacggttttccacgctttggcttcgtcgcttaacggcttgagcttggaaccgaagttgacttcgcctttgccctgcaaggcggcgaggtcgaaaccggcgttttccaggctttggcgcataaagctggcgggcacaccggagactgctggagtgtgcacgatgtcggcggcgcgggatgtgagcagcatctccttataggcatccggtgcatggctttcagtggtaccgataaagcgcgtgccgaaataggcaaggtctgcgccgagcaattgcgcggcgagaacttcgtgcccgtggttgaggcaaccggccagcagcagggttttatcgaagaactggcggatttcggcgatcagcgcgaaggggctccaggtgccggcatgcccgccagcgcctgcggccacggcgatcagcccgtccacgccggcctctgcggctttctcggcatggcgccgggtggtgacgtcatgaaagaccaggccgccgtagctgtgtacggcgtccactaattccttgaccgcgcccaggctggtaatgacgatcggcaccttgtgctcgacgcagatcgccaggtcagcttccagccgtggattgctattgtgcacgatcaggttcacggcatacggcgcggggttctccagctgcgccaggcctgcttcgatttcttccagccaggctttgaagccgctgctctcacgctggttgagcgccgggaaactcccgatcactccgttgcgacagcaggccaggaccagttgcgggttggagatcaggaacatcggcgccaccacgacgggcaaacacaggtgttgttcaagagaagcgggcagcgacattggaggtaccccgtgtgattgaagttagaacggtttgaccacgaccaaaattacgatagccagcaatatcagaaccggcacttcattgaaccagcgataaaagacatggctgcgggtgttttcgccacgggcaaaacgttttacctgcgcgccgcacatatggtggtagccgatcagcagtaccacgagggtcagcttggcgtggatccaggcgccggagtgaaaaatgctcgggttcaggtagatcagccagccgccgaaaatcagcgtggcgatcatcgccgggcccatgatgccgcggtagagcttgcgctccatgatgctgaagcgttccttgctgacggtgtcctcgctttgggcgtggtagacgaacaggcgtggcaggtagaacagcccggcaaaccagcagacgatgctgacgatgtggaaggctttgacccatagatagagcatttctagttattcccaggttcacggtaactgaagatagtagtggctcctgcgcccatacgtcacgttggcggttgtcgcaggacgatacggcccctattatcgacggctttccagtgggttcgttgagggcaggtttatggtcaaggtcggtatcgtcggcggcacgggttacaccggtgtcgaattgctgcgtctgttggctcagcatccgcaagctgaggtcgtggtgatcacctcccgatccgaggccgggcttgccgtggccgacatgtacccgaacctgcgaggccactacgacggcctggcgttcagcgttccggacatcaagaccttgggcgcctgcgatgtggtgttcttcgccacgccccacggtgttgcccatgcgctggcgggtgaactgctggccgccggcaccaaggtcatcgacctgtcggctgacttccgtctgcaagacgctgacgagtgggccaagtggtacggccagccgcacggtgcgccgcagttgctggaagaggctgtttacggcctgccggaagtcaaccgtgagcagatcaagcaagcgcgcctgattgctgtgccgggttgctatccaaccgcaacgcagctgggtttcctgccgttgctggaggctgggttggcggatacttcgcgtttgatcgctgactgcaagtcaggcgtcagcggcgccggccgtggtgccgccgtaggttcgctgtactccgagacgtcggaaagcatgaaggcttacgcggtaaaagggcatcgtcacttgccggaaattcgccagggtttgcgtcgtgcagcgggcaaggacgtgggcctgaccttcgtgccgcacttgacccctatgattcgtggcattcactccacgttgtacgcaacggtcgttgatcgctcggtagacctgcaggcgctgtttgaaaagcgttatgccaacgagccattcgtcgacgtgatgccggctggcagccacccggaaacccgtagcgtacgcggcgccaacgtctgccggattgccgtgcaccgtccgcaggatggcgacctggtggtggtgctgtcggtgatcgacaacctggtcaagggcgcgtcgggccaggcggtgcagaacctgaacatcctgtttggcctggacgagaagctgggcctgtcccacgcgggcatgctgccttaagcgtttttcgctgttgcacaaaaggcccgttgatcgggccttttgtgtttttaatggcgcaagcgccgattgatataccgtaacaatagttgaccgcttttctaggagaagcggataatgcccgtcattacgcatatggcggcggtacgccgggagattatcagcatgagcgttgaatccttcacccccacggctttgcaattcacccacggtgctgcgcacaaggtgaagagcctggtcgatgaagagggtaatgatcgcttgaagctgcgcgtttttgttacgggcggcggttgttcagggtttcagtacggttttaccttcgatgaagacgtggccgacgacgacaccatcgtcgagcgcgagggcgtcagcctggtcgtggacccgatgagcttccagtatttggcaggcgcagaggtggattaccaggaaggtttggaaggttcgcgattcgtgatcaagaacccgaatgccaccacgacctgtggttgcgggtcttcgttctcgatctgatcgatagcctgattcacgaggcatataaaaacgccgcttggctttgataggccaagcggcgtttttgtgtccgcaggttataccgggtaaatcgcgcccaatacccgaagcccgcgcgcgccggtgacgctggggcggttggcggcgatgccttcgaggcagcaatgggcgagccaggcgaaggccatggcttcgacccagtcagggtccacgccgtaagtggacgtgctgctgacctgtgtggccggtaacagccccgccaggcggctcatcagcgtggcgttatgcgcgccgccgccgcagatcaacagggtttcagtgtccgattgcgcagtttgcagagactcaacgaccgtcagcgctgtgagttccagcagggtggcctggacatcctggggctcaaacgcaggcaatccggcgaggtgttgttgcagccagcccaggttgaacacttcgcgccccgtgcttttcgggcctttggtctggaagaaggaatcgctcagcagggtgttgagcaactgaggttcgaccttgccactggcggcccattggccatcgcgatcaaagtgctcgccacgttggtgatgaatccaggcgtccagcaaaacattgcccgggccgcagtcgaagccggccacgggtttgccggtctcgatcaagctgaggttgctgaacccgccgacgttcaatacggcgcggttgccggtgtgctcaccaaacagcgcttcatgaaaggcaggcaccaagggcgcgccttggccgccagcggctacgtcgcggctgcggaagtcgccgacgacggtgatgccggtcagctcagtgagtaacgcagggttaccaatctgaacagtgaaaccacgcgcgggctcatggcggatggtctgtccgtggctgccaatcgcgcgaacgtcttgtggcttgaggttctgttgctccagcaaggtatggatgccttgggcagccagtgtcacccagtgttgctgggcaatcgccgagcgggcgatctcgtccgggccgctggcgcacaggccaagcagctcggcgcgcaggctatcgggcatggggatgtagtgtgtggcgatcagattgatcgccgagtcctgcctgatcagggcgatatccaggccgtcaaggctggtcccggacatcacacctatatagagcggcatgccttaacgcttcgccgaagcaagcagggtggagcgttcctggtccatacgcgccatcagcggttggctctgttgcaggaagcgcgcgcgctcggccttggcgattggatcagccattggcagcttctggccaagcgggtcgacgtggacgccgttgacctggaactcgtagtgcaagtgcgggccggtagacaggcccgttgtgccgatatagccaatcacttggccttgcttcacgttgctgccggtggacacgcccttggcgaagccctgcatatggccatacagcgtgcggtaggtgttgccgtgctggatgatcaccgtattgccgtagccaccgcggcgcccggccagtaacaccttgccgtcaccggctgccttgattggcgtgccgcgtggggctgcatagtcgacgcctttgtgggcgcggattttgttcagaatgggatgcttgcgccccatggaaaagcgcgagctgatgcgagcgaagtccaccggggtgcggatgaaggccttgcgcatgctgttgccgtcggcagtgtagtagctgctgttgccttgtttgttggtgtagcgaacggcggtataggtcttgccgcggttggtaaagcgcgcggaaagaatggcgccggtgccgaccactttgccgttggcgactttctgttcgtagatcacgtcgaattcgtcaccctggcggatgtcttgggcgaagtcgatgtcgtagccaaacacgctggccatgtccatggtcatgctgtgggacaagccggcgcgggcggcggactgcgacagcgagctgttgattacgccgtgcacgtaggctgagcgcatcaccggtttggtggtgacgcgattgaaggcgaagcctttggcgcctttggtcagagtgatgctttcgaggtcgctgacgctgctgtggaggttgttcagctggccgtcgggggtgagttcaaactccagtttctggccgtgtttgagctgggtgaactgcttggcttgtttatcgctggccaagacctcattaacagttgcagcaggcaggccgactttctcgaagagcgttgacaacgtgtcgcccttggcaacgatcacttcgcggtgctgagggtttttggcgacgaccggtgcaggcggctcctgggcggcctgtttagtgtcttcgggtgtgttttctatttgtgcaaacggggattctgtcggtgcgtttgtggcttgttgcgcgtcggaagcgtcttgatcttgtgtcagttgttcaactggactttccaggtcaaggctcagggatgttcgtttggcttctacgtcactggaagggaataccaggagtgccaggctgagaagggcggcgataccacttgcggcgagcaagtgggtcttcgggtaaagcggcggcgctttagacggttctgtggtcataagtaattttgactttgaagatgaaatggaaaagatgaatgacatgatgaagatgaaataactgtataaaatataaccaaatcatctgtggcgcaagcttgcgaatgccgggcttgctgaacggtgcccgtacgcaggacaaaacttgtaattagtccctgatcttgtatggttggttcccttttgaatctgagccttgcgggtctgttatgaagtcggttgaagagcagctagcgctgataaaacgtggtgcggaagaactgttggtcgaggctgagctggtcgaaaagctcaagcgcggccagcccctgcgtatcaaggccggctttgatccgacggcgccggatttgcacctgggtcataccgtccttattaataagctgcgccagttccaggagctggggcatcaggtcatcttccttataggtgacttcacggggatgatcggtgatccgagcggaaaaagtgctacgcgcccgccgctgacgcgtgagcaggttcttgataatgccgagacctacaagacccaggtattcaagattcttgatccggccaagaccgaagtagcgttcaactccacttggatggatcagatggggccggccgactttattcgcctgacctcccagtacaccgtcgcgcgcatgcttgaacgcgatgacttcgataagcgctactcaaccaatcagccaatcgccattcatgagttcctctatccgttggttcaagggtatgactcggttgcgttgcgtgcggacgttgaattgggcgggactgatcagaagttcaacctgttgatggggcgtgagctacaacgtgcatacgggcaagaggctcagtgcattctgaccatgccattgctcgaagggttggatggcgtcaagaagatgtccaagtccttgggtaactatgtcggtatccaggaagcgccgggtgtcatgtacggtaagctggtttcgattccggatgcgttgatgtggcgttatttcgagctgttgagcttccgctcaatggatgaaatcaatgcgctgcgcgctgaagtcgaggcgggtgccaatccgcgtgacgtgaagatcaagctggccgaagagatcgttgcccgtttccatggtgaagaggctgcggcgagcgctcaccgtgctgcgggtaaccgcatgaaggatggcgagctgccggatgatctgccagagatcgagctgactgctgcagaagcaatgccgattgccgccgtccttaataaggcaggcctggtgaagaactcggcggttgcacgtgacctgttgggttccggtggtgtgcgtatagatggtgaggttgtggatcgcacctttatatatgaactgggcgcgacccatgtctgccaggctggcaagaaggcatttgcacgtattacgctcaaatccgaataaaactgaaattaggtgttgacggcgttttatatctgtctataattcgccccacttccggcgcagtcgaaacggaaaactccttggtaaacaaagagttatgcgagattcgacagtgagttgcttcagttcatcgaagcccagaaggagttgatagagcggtgttgtttggctctattaacgtttcgatcctctcggtcgaaagcggagaaaaagaggtgttgacagcagcgtgtaacgctgtagaattcgcctcccgctaacgagagatcggaagcgcaagtggttgaagttgttgaagaaatcttcgaaaacttctgaaaataatcacttgacagcaaatgaggctgctgtagaatgcgcgcctcggttgagacgaaagatcttaaccaaccgctctttaacaactgaatcaagcaattcgtgtgggtgcttgtggagtcagactgatagtcaacaagattatcagcatcacaagttactccgcgagaaatcaaagatgtaaccaacgattgctgagccaagtttagggtttcttaaaaacccaaagatgtttgaactgaagagtttgatcatggctcagattgaacgctggcggcaggcctaacacatgcaagtcgagcggtagagagaagcttgcttctcttgagagcggcggacgggtgagtaatgcctaggaatctgcctggtagtgggggataacgttcggaaacggacgctaataccgcatacgtcctacgggagaaagcaggggaccttcgggccttgcgctatcagatgagcctaggtcggattagctagttggtgaggtaatggctcaccaaggcgacgatccgtaactggtctgagaggatgatcagtcacactggaactgagacacggtccagactcctacgggaggcagcagtggggaatattggacaatgggcgaaagcctgatccagccatgccgcgtgtgtgaagaaggtcttcggattgtaaagcactttaagttgggaggaagggttgtagattaatactctgcaattttgacgttaccgacagaataagcaccggctaactctgtgccagcagccgcggtaatacagagggtgcaagcgttaatcggaattactgggcgtaaagcgcgcgtaggtggtttgttaagttggatgtgaaatccccgggctcaacctgggaactgcattcaaaactgactgactagagtatggtagagggtggtggaatttcctgtgtagcggtgaaatgcgtagatataggaaggaacaccagtggcgaaggcgaccacctggactaatactgacactgaggtgcgaaagcgtggggagcaaacaggattagataccctggtagtccacgccgtaaacgatgtcaactagccgttggaagccttgagcttttagtggcgcagctaacgcattaagttgaccgcctggggagtacggccgcaaggttaaaactcaaatgaattgacgggggcccgcacaagcggtggagcatgtggtttaattcgaagcaacgcgaagaaccttaccaggccttgacatccaatgaactttccagagatggattggtgccttcgggaacattgagacaggtgctgcatggctgtcgtcagctcgtgtcgtgagatgttgggttaagtcccgtaacgagcgcaacccttgtccttagttaccagcacgttatggtgggcactctaaggagactgccggtgacaaaccggaggaaggtggggatgacgtcaagtcatcatggcccttacggcctgggctacacacgtgctacaatggtcggtacagagggttgccaagccgcgaggtggagctaatcccataaaaccgatcgtagtccggatcgcagtctgcaactcgactgcgtgaagtcggaatcgctagtaatcgcgaatcagaatgtcgcggtgaatacgttcccgggccttgtacacaccgcccgtcacaccatgggagtgggttgcaccagaagtagctagtctaaccttcgggaggacggttaccacggtgtgattcatgactggggtgaagtcgtaacaaggtagccgtaggggaacctgcggctggatcacctccttaatcgacgacatcagctgctccataagttcccacacgaattgcttgattcattgaagaagacgataagaagcagcccgaaattgggtctgtagctcagttggttagagcgcacccctgataagggtgaggtcggcagttcgaatctgcccagacccaccaattttgtgtgggaaacgcctgtagaaatacggggccatagctcagctgggagagcgcctgccttgcacgcaggaggtcaacggttcgatcccgtttggctccaccactactgcttctacgttatgaaagcttagaaatgagcattccatcaggttgatggtgaatgttgatttctagtctttgattagatcgttctttaaaaatttgggtatgtgatagaaagatagactgaacgttactttcactggtaacggatcaggctaaggtaaaatttgtgagttctcttagttgagaaattcgaattttcggcgaatgttgtcttcacagtataaccagattgcttggggttatatggtcaagtgaagaagcgcatacggtggatgccttggcagtcagaggcgatgaaagacgtggtagcctgcgaaaagcttcggggagtcggcaaacagactttgatccggagatgtctgaatgggggaacccagccatcataagatggttatcttacgctgaatacataggcgtaagaggcgaaccaggggaactgaaacatctaagtaccctgaggaaaagaaatcaaccgagattcccttagtagtggcgagcgaacggggactagcccttaagtggctttgagattagcggaacgctctggaaagtgcggccatagtgggtgatagccctgtacgcgaaaatctcttagtcatgaaatcgagtaggacggagcacgagaaactttgtctgaatatggggggaccatcctccaaggctaaatactactgactgaccgatagtgaactagtaccgtgagggaaaggcgaaaagaaccccggagaggggagtgaaatagatcctgaaaccgtatgcgtacaagcagtgggagcagactttgttctgtgactgcgtaccttttgtataatgggtcagcgacttattttcagtggcgagcttaaccgaataggggaggcgtagcgaaagcgagtcttaatagggcgtctagtcgctgggaatagacccgaaaccgggcgatctatccatgggcaggttgaaggttgggtaacactaactggaggaccgaaccgactaccgttgaaaagttagcggatgacctgtggatcggagtgaaaggctaatcaagctcggagatagctggttctcctcgaaagctatttaggtagcgcctcatgtatcactgtagggggtagagcactgtttcggctagggggtcatcccgacttaccaaaccgatgcaaactccgaatacctacaagtgccgagcatgggagacacacggcgggtgctaacgtccgtcgtgaaaagggaaacaacccagaccgtcagctaaggtcccaaagttatggttaagtgggaaacgatgtgggaaggcttagacagctaggaggttggcttagaagcagccaccctttaaagaaagcgtaatagctcactagtcgagtcggcctgcgcggaagatgtaacggggctcaaaccatacaccgaagctacgggtatcacgtaagtgatgcggtagaggagcgttctgtaagcctgtgaaggtgagttgagaagcttgctggaggtatcagaagtgcgaatgctgacatgagtaacgacaatgggtgtgaaaaacacccacgccgaaagaccaaggtttcctgcgcaacgttaatcgacgcagggttagtcggtccctaaggcgaggctgaaaagcgtagtcgatggaaaacaggttaatattcctgtacttctggttattgcgatggagggacggagaaggctaggccagcttggcgttggttgtccaagtttaaggtggtaggctgagatcttaggtaaatccgggatcttaaggccgagagctgatgacgagctaacttttagttagcgaagtggttgatgccatgcttccaagaaaagcttctaagcttcaggtaaccaggaaccgtaccccaaaccgacacaggtggttgggtagagaataccaaggcgcttgagagaactcgggtgaaggaactaggcaaaatggcaccgtaacttcgggagaaggtgcgccggtgagggtgaaggacttgctccgtaagctcatgccggtcgaagataccaggccgctgcgactgtttattaaaaacacagcactctgcaaacacgaaagtggacgtatagggtgtgacgcctgcccggtgccggaaggttaattgatggggttagctaacgcgaagctcttgatcgaagccccggtaaacggcggccgtaactataacggtcctaaggtagcgaaattccttgtcgggtaagttccgacctgcacgaatggcgtaacgatggcggcgctgtctccacccgagactcagtgaaattgaaatcgctgtgaagatgcagtgtatccgcggctagacggaaagaccccgtgaacctttactatagctttacactggactttgaatttgcttgtgtaggataggtgggaggctttgaagcgtggacgccagtctgcgtggagccatccttgaaataccaccctggcaactttgaggttctaactcaggtccgttatccggatcgaggacagtgtatggtgggtagtttgactggggcggtctcctcctaaagagtaacggaggagtacgaaggtgcgctcagaccggtcggaaatcggtcgtagagtataaaggcaaaagcgcgcttgactgcgagacagacacgtcgagcaggtacgaaagtaggtcttagtgatccggtggttctgtatggaagggccatcgctcaacggataaaaggtactccggggataacaggctgataccgcccaagagttcatatcgacggcggtgtttggcacctcgatgtcggctcatcacatcctggggctgaagccggtcccaagggtatggctgttcgccatttaaagtggtacgcgagctgggtttagaacgtcgtgagacagttcggtccctatctgccgtggacgtttgagatttgagaggggctgctcctagtacgagaggaccggagtggacgaacctctggtgttccggttgtcacgccagtggcattgccgggtagctatgttcggaatagataaccgctgaaagcatctaagcgggaaactagcctcaagatgagatctcactggaaccttgagttccctgaagggccgtcgaagactacgacgttgataggttgggtgtgtaagcgctgtgaggcgttgagctaaccaatactaattgcccgtgaggcttgaccatataacacccaagcaatttgactactcgaaagagcatcagattgcggtgtgtgaagacgagatgaaccgaaagttcgacgttcacaaaacaccgaaagctgtcacatacccaatttgctgaagcgaggcataggccacgactcagtacccgaatttcttgacgaccatagagcattggaaccacctgatcccatcccgaactcagtagtgaaacgatgcatcgccgatggtagtgtggggtttccccatgtgagagtaggtcatcgtcaagattaaattccagaacccctgtttgctaacgcaaacaggggttttgttttgggcggccggaaagtgatagtcgtggcgcggggtcgccttaggttctaaagcccagcggtttctatgcaatgaccttgcgcatggctatcatgcgtgcctcattgtgaggcgatacttgcatgctgacgttgttgaaacttctgaaagatggccgattccactccggggaggcgctgggcgaggccttgggcgtcagtcgcagtgctgtatggaaacagctccagcatcttgaggccgaactgaacttgccgattcataaagtccgcggcaagggttatcagttggcctctccgttggtatttttgagcgcccaggagatcgtagccaatgcgccttctttggtatggccaatccatatttttgactctattgactccaccaacgccgaagccttaaggcttgtcggggctggttgcgcggcgccctttttagtgctcgcggaacagcaaacggccggcagaggacggcgaggccgtaagtgggtcagcccttttgctcaaaacgtgtattacagcctcgtcttgcgcattgagggtggcttgcggcagttggaggggcttagcctcgtggtagggttggcggtaatgcaagccctgcgttctgtaggggtgcaaggggctgccttgaaatggccgaacgacgtcttggtcgggccgaagaaaatcgccggtatattgctggagttggtcggggaccctgctgacatctgccacgttgtcttgggaataggaattaacgtgaatatgcagaaggcggatggcgtcgaccagcaatggacctcggtggggcttgaaaaaggctgtccagttgatcgtaacgatttggtcgctcaactcgggctgcagttacaagtctacctggatcggcatatggcttctgggtttgcgcagctgcaggacgagtgggagcaacaccacttgtggcagggaaaggctgtatctcttattgcaggtgtgaatcagattgatggggtggtcttgggtgttgatcgccaaggtgcactgcgcttgagtgttgacggtgtcgagaaaatttacagcggtggtgagctaagcctgaggttgcgtgatgattcttgagctcgactgtgggaatagctttatcaagtggcgtgtacttgcgccgaatggagctcaagcctccgcagagggggttgttggttcagatgtagcattgattgaaagcctggtggcgatttcgggcttgttgctgacgcggtgccggctggtgagtgtccgagccgctgaggaaactgaaaagttggtcaaggcgctggagagtgctttcggtgtcgaagtttcgtgtgcggtctctgcgcgcgagatgggcggtgtgcgtaacggttatgaggagtttgagcgtctcgggctcgatcgctggttggcaatgctcggtgggttcaagcttgcgtccggcgcatgcctggtgctcgacttcggtaccgcggcgactgctgattttatcggcgccgatggtgagcacctgggtggctttatctgtcctggaatgccgctgatgcgcagccagctgcgcacgcatacacgcaaaattcgctacgacgatgcggcggctgagcaggcggttgagcgcctctcgccaggccgtacaaccgtagaggccgtcgagcgtggttgtacgctaatgctcagggggtttgtgcttactcagcttcagttggcccaaagttattggggggaggactttactgttttcctgacaggcggggatgctgacctggtcgtcgaggctgtgccccgggcaaggctcgtacctgatctggtttttgtagggttggcgatggcatgccctttgtcctgaggtgtttatgcgttggctgtttttgcttttgctcgttctcaatgccttctattacatctggcatcaacaagatgctccactgcgtgccaaggacgttacgcccttaagtctctatcggggctctcagcaggatattcgcctgttgagcgaatcttccgaccctattgtgcggcgcgatcgggcgaaaggacctgacgccccaaatacctgcttatacatcggtggctttgctgatcagcagcaggctcaatcggttgagcagcgcctcatgagcctggatatcaaggtcaaggtccagttgctcaatacgtcggatgcatcgggctactggctccgcgtggctcctgaaagcaggcgcttggctgacgatctgccctttgaaaaccttgctaaggaattcaatgagttaaaacataaaataatgttgtgcgaaggcgttgcaactcacgaatagtttgcatagaatggcgcccgcttcgcagtgaagacctttacagtctacagcgtggagtgatcgtcaacgcagctaacctcatatttttaaatgagaaaatgcttgacagaaggtcggcgtgatgtaaaatgccggctcgcttaggaggggttcccgagcggccaaagggatcagactgtaaatctgacgtctacgacttcgaaggttcgaatccttccccctccaccatttttagcgtgagctgcaagctccgcgggtatagtttagtggtagaacctcagccttccaagctgatgatgcgggttcgattcccgctacccgctccaagtttgcaggttgtgcaaggtgttttgctcttgtagctcagttggtagagcacacccttggtaagggtgaggtcagcggttcaaatccgctcaagagctccatataacaaggcagatatgaaaatatctgcctttgttttaacagctgcctcggcttgttggtgttgcgcttggctttattgctgggtgatttcaggtctagtggggttggttgttgtaaagtctttttcgggcctgcataatggtcggcctgattttgttttaggtcagtagctcaattggcagagcgacggtctccaaaaccgtaggttgggggttcgattccctcctgacctgccagattcacgtggtgtgtctggctttcttttcacaggatcttcatagatgactcctaaggctgaagctcaaagctctcgtttcgatctcgtcaagtggctcgctgtggtcgcgttggtggtcgtaggcgttgttggcaatcagtattactctgcttcgccgatcctgtaccgtgtcctcgctttgctcgcccttgctgctgtagctgcctttgtaggcctgcagactgccaaaggcaagtctttcgcggtcctggtaaaggaagctcgcactgaaattcgtaaagtcgtttggccgactcgccaagaaactacgcagaccacgttgatcgttgtggctgttgttctggttatggcgttgctgttgtgggggcttgattccctgctcggctggcttgtttccttgattgttggctaagggtgtcccgtggctaagcgttggtacgttgtgcatgcttactcgggttacgagaagcatgttatgcgctctttgctagagcgcgtaaagctcgcaggcatggaagatggcttcggcgaaattctggttcccactgaagaagtggttgaaatgcggaacggccagaagcgcaaaagcgaacgcaagttcttccctggctacgtgctggttcagatggacatgaatgaaggtacttggcacttggtcaaggatacccctcgtgtcatgggtttcattggcggtactgctgataagcctgctccgatcaccgacaaagaggcagaagcgattctgcgtcgtgttgctgacggtagcgacaagcctaagccgaagacgttgttcgagccaggcgaggttgttcgtgtcacagatggtccgtttgctgatttcaacggcaccgtcgaagaagttaactacgaaaagagccggatccaggtcgcggtgctcattttcggtcgctctactccggtagagctggagttcagtcaggtcgagaaggtctagctgagcaagcatcccaaccccgcagcctcaggctgtggggttttgtcgtcactgggatatacgcgcaagtaaccggggagcctttcgaggcgcttgaacccgtaattggagtgcctcatggccaagaagattaccgcttacatcaagctgcaagtgaaggccgcacaggccaacccaagtccacccgtcggtccagctctgggtcaacacggcgtgaacatcatggaattctgcaaggccttcaacgcccgtactcagggtcttgagccaggtctgccgactccagtgatcatcactgtatacagcgaccgtagcttcactttcgaaaccaagtcgaccccggcttcggttctgttgaagaaagctgctggtctgactagcggttccgctcgtcctaacaccgttaaggttggcaccgtgactcgtgctcagctggaagaaatcgcgaaaaccaaaaacgcggatctgactgcagctgatatggatgcagccgtgcgtaccatcgccggttctgctcgtagcatgggccttaacgtggagggtgtgtaatggctaagctgaccaagcgccaaaaggctatcgccggtaaaatcgaagcgggcaagtcctacaactttgtagatgctgctgctctgctgaccgaactgtcgactgtcaagttcagcgagtccgttgacgttgctgtaaacctgggtgttgacccacgtaaatccgaccaggtcgttcgtagcgctactgtgctgccacacggtactggcaagactgtacgtgttgctgtcttcactcaaggcccggcagctgaagctgctctggccgctggcgccgaccgcgttggcatggatgacctggctgccgaaatgaaaggcggcgacctgaactatgacgtcgttattgcttccccggatgcaatgcgcgttgtaggtcagttgggtcagatcctcggtccacgtggtctgatgcctaaccctaaagtcggcaccgtaactccagacgtagccaccgcggttaaaaacgccaaggctggtcaggttcgttatcgcaccgacaaaaacggcatcatccacacttccgttggcaaggtcggctttgatgccgtcaagctgaaggaaaacgttgaagccctgatcgctgatctgaagcgtatcaaaccagcttcctcgaaaggtatctacgtcaagcgcgttaccctgagcaccactatgggcccaggtctggtcatcgaccaaggctcgctggacgtataagacacaggttggtgcgagagatcgcgccaattgaaaaattggggtccctgcctggcgggggctatccaagaccgtaggcgacgcaagtcttaaaccacaagcctacgcagatggtgctcccggttccttaccgaatcagacaccaaaacgacatccggcctaggccagatgaaacggtaacaagcaggagttaaacccgtggcaattaatctcgaagacaagaaggccatcgtcgctgaagtcaacgaggctgccaaagctgctctgtccgctgtcgtggctgatgcccgtggtgtgacagtaggcgctatgaccggactccgtaaagaggctcgtgaagctggcgtatacgtacgtgttgtacgtaacaccctgctcaagcgcgctgttgctgacactgaatacagtgtcctcaatgacgtgttcaccggcccgaccctgattgcgttctccactgatcatcctggcgctgctgcccgtttgttcaaggaattcgccaagggtcaggataagttcgagatcaaggcagctgcgttcgagggcaagttcctcgcagctaaccaaatcgacgtactggcaacactgccgacccgtaacgaagctatttctcagctgatgagcgtgattcaaggcgctaccagcaagttggctcgtactctggccgcagttcgcgagcaaaaagaagctgccgcagcctaaggctgagcattttctctcgcgtttttttgtttatttcgatggccgcgtaggccgtcccccaattcaggaaatacagcaatgtctatctcccaagacgatatcctcaacgccgtagctgaaatgtcggttctgcaggttgttgagctgatcaaagctttcgaagaaaaattcggcgtttccgctgccgctgcttctgctggcccagctgttgctgctgttgctgctgaagagcaaaccgaattcaacgtcatgctgctggaagctggcgagaagaaagtaaacgtgatcaaggcagtacgtgaactgaccggtctgggcctgaaagaagccaaggctgtagttgacggcgctcctgcccaggttctggaagcagtgtcgaaagacgcagctgacaaagctaaagcagtgctggaagaagcaggcgctaaagtcgagctgaagtaagcatcgaccttgcgtctccagcccaagcgttaagctgaaggctgatggctggtggctcttgccaccggcctttttccgttcttggctgtcgactcggtcgccgccattaacgcgctgtagccacccgatgcggtggtgcaaaccatggggtttgcgagattttctggctgctcccgtcgggaggggccaaacaagcaggtgaccaagctggggaacgctgatggcttactcatatactgagaaaaaacgtatccgcaaggactttagcaagttgccggacgtcatggatgtcccgtaccttctggctatccagctggattcgtatcgtgaattcttgcaggcgggagcgaccaaagatcagttccgcgacgtgggcctgcatgcggccttcaaatccgttttcccgatcatcagctactccggcaatgctgcgctggagtacgtgggttatcgcctgggcgaaccggcatttgatgtcaaagaatgcgtgttgcgcggtgttacgtacgccgtacctttgcgggtaaaagtccgtctgatcattttcgacaaagaatcgtcgaacaaagcgatcaaggacatcaaagagcaagaagtctacatgggcgaaatcccgttgatgactgaaaacggcaccttcgttatcaacggtaccgagcgtgtaatcgtttcccagctgcaccgttccccgggcgtgttcttcgaccacgaccgcggcaagacgcacagctccggcaagctcctgtactccgcgcggatcattccgtaccgcggctcgtggttggacttcgagttcgacccgaaagactgcgtgttcgtgcgtatcgaccgtcgtcgcaagctgccggcctcggtactgctgcgcgcgctcggttacaccactgagcaagtactggatgccttctacaccaccaacgtattcagcctgaaggatgaaaccctcaagctggagctgatcgcttcgcgtctgcgtggtgaaattgccgtcctggacatccaggatgagaaaggcaaggtcattgttgaggctggccgtcgtatcaccgcgcggcacatcaaccagatcgaaaaagccggtattaaagagctggaagtgcctctggactacgtcctgggccgcactaccgccaaggtcatcgttcacccggcgacaggcgaaatcctggctgagtgcaacaccgagctgaacactgagatcctggccaagatcgccaaggctcaggtcgttcgcatcgagaccctgtacaccaacgatatcgactgcggtccgttcatctccgacactctgaagatcgactccaccagcaaccaattggaagcgctggtcgagatctatcgcatgatgcgtcctggtgagccaccaaccaaagacgctgccgagaccctgttcaacaacctgttcttcagccctgagcgttatgacctgtctgcggtcggccggatgaagttcaaccgtcgtatcggtcgtaccgagatcgaaggttcgggcgtgctgtgcaaggaagacatcgtcgcggtactgaagactctggtcgacatccgtaacggcaaaggcatcgtcgatgacatcgaccacctgggtaaccgtcgtgttcgctgcgtaggcgaaatggccgagaaccagttccgcgttggcttggtacgtgttgagcgtgcggtcaaagagcgtctgtcgatggcagaaagcgaaggcctgatgccgcaagacctgatcaacgccaagccagtggctgcggcggtgaaagagttcttcggttccagccagctttcccagttcatggaccagaacaacccgctctccgagatcactcacaagcgccgtgtatctgcactgggcccgggcggtctgacccgtgagcgtgctggctttgaagttcgtgacgtacaccctacgcactacggtcgtgtttgcccgatcgaaacgccggaaggtccgaacatcggtctgatcaactccctggccgcttatgcgcgcactaaccagtatggcttcctcgagagcccgtaccgtgtggtgaaagacgctctggtcaccgacgagatcgtgttcctgtccgccatcgaagaagctgatcacgtgatcgctcaggcttcggccacgatgaacgacaagaaagtcctggtcgacgagctggtagctgttcgtcacttgaacgagttcaccgtcaaggcgccggaagacgtcaccttgatggacgtgtcgccgaagcaggtagtttcggttgctgcgtcgctgatcccgttcctggagcacgatgacgccaaccgtgcgttgatgggttccaacatgcagcgtcaagctgtaccgaccctgcgcgctgacaagccgctggtaggtaccggcatggagcgtaacgtagcccgtgactccggcgtttgcgtcgtggctcgtcgtggcggcgtgatcgactccgttgatgccagccgtatcgtggttcgtgttgccgatgacgaagttgaaactggcgaagccggtgtcgacatctacaacctgaccaaatacacccgctcgaaccagaacacctgcatcaaccagcgtccgctggtgagcaagggtgatcgcgttcagcgtagcgacatcatggccgacggcccgtccaccgacatgggtgagctggctctgggtcagaacatgcgcatcgcgttcatggcatggaacggcttcaacttcgaagactccatctgcctgtccgagcgtgttgttcaagaagaccgcttcaccacgatccacatccaggaactgacttgtgtggcgcgtgacaccaagcttgggccagaggaaatcactgcagacatcccgaacgtgggtgaagctgcactgaacaagctggacgaagccggtatcgtttacgtaggtgctgaagtaggcgcaggcgacatcctggtcggcaaggtcactccgaaaggcgagacccaactgactccggaagaaaaactgctgcgtgccatcttcggtgaaaaagccagcgacgttaaagacacttccctgcgtgtgcctaccggcaccaaaggtactgtcatcgacgtacaggtcttcacccgtgacggcgttgagcgtgatgctcgtgcactgtccatcgagaagacccagctcgacgagatccgcaaggacctgaacgaagagttccgtatcgttgaaggcgcgaccttcgaacgtctgcgctccgccctggtaggccacaaggctgaaggcggcgcaggtctgaagaaaggtcaggacatcaccgacgaaatcctcgacggtcttgagcacggccagtggttcaagctgcgcatggctgaagatgctctgaacgagcagctcgagaaggcccaggcctacatcgttgatcgccgccgtctgctggacgacaagttcgaagacaagaagcgcaaactgcagcagggcgatgacctggctccaggcgtgctgaaaatcgtcaaggtttacctggcaatccgtcgtcgcatccagccgggcgacaagatggccggtcgtcacggtaacaaaggtgtggtctccgtgatcatgccggttgaagacatgccgcacgatgccaatggcaccccggtcgacgtcgtcctcaacccgttgggcgtaccttcgcgtatgaacgttggtcagatccttgaaacccacctgggcctcgcggccaaaggtctgggcgagaagatcaaccgtatgatcgaagagcagcgcaaggtcgcagacctgcgtaagttcctgcacgaaatctacaacgagatcggcggtcgcaacgaagagctggacaccttctccgaccaggaaatcctggatctggcgaagaacctgcgcggcggcgttccaatggctaccccggtgttcgacggtgccaaggaaagcgaaatcaaggccatgctgaaactggcaggcctgccggaaagcggccagatgcagctgttcgacggccgtaccggcaacaagttcgagcgcccggttactgttggctacatgtacatgctgaagctgaaccacttggtagacgataagatgcacgctcgttctaccggttcgtacagcctggttacccagcagccgctgggtggtaaggctcagttcggtggtcagcgtttcggggagatggaggtctgggcactggaagcatacggtgctgcttacactctgcaagaaatgctcacagtgaagtcggacgatgtgaacggccggaccaagatgtacaaaaacatcgtggacggcgatcaccgtatggagccgggcatgcccgagtccttcaacgtgttgatcaaagaaattcgttccctcggcatcgatatcgatctggaaaccgaataacacgtgacgcgaatcgagagcggggctgtttagcccgctctctgctccgccaggaggaaaggccttgaaagacctactgaatttgctgaaaaaccagggtcaagtcgaagagttcgacgccatccgtattgggttggcatcgcctgagatgatccgttcgtggtcgttcggtgaagttaaaaagccggaaaccatcaactaccgtacgttcaaacctgaacgtgacggcctgttctgcgccaagatctttggcccggtaaaggattacgagtgcctgtgcggtaagtacaagcgcttgaagcaccgtggtgtgatctgcgagaagtgcggcgttgaagttgcactggccaaggttcgtcgtgagcgcatggcgcacatcgaactggcttcgccggttgcccacatctggttcctgaaatcgctgccgtcccgtatcggcttgctgatggacatgaccctgcgtgatatcgaacgcgttctctacttcgagagctatgtcgttatcgatccgggcatgaccacccttgaaaaaggtcagctgctgaacgacgagcagtacttcgaagcgctggaagagttcggcgacgatttcgatgcccgcatgggtgccgaagctgtccgcgaactgctgcacgctatcgacctggaacacgagattggccgtctgcgcgaagaaattccgcaaaccaactccgaaaccaagatcaagaaactgtccaagcgtctgaagttgatggaagccttccagggttccggcaacttgccagagtggatggtgctgaccgttctgccggttctgccgccagacctgcgtccgctggtaccgttggacggtggtcgtttcgcgacgtccgacctcaacgacctgtaccgccgcgtgatcaaccgtaacaaccgcttgaagcgcctgcttgatctgtccgctccggacatcatcgtgcgcaacgaaaagcgtatgttgcaagaagccgtcgatgccttgctcgacaacggtcgtcgtggccgcgctatcacaggttccaacaagcgtcctctgaaatccctggctgacatgatcaagggtaagcaaggccgtttccgtcagaacttgctcggtaagcgtgttgactactccggtcgttcggtaattaccgtaggcccgaccctgcgtctgcaccagtgcggtctgcccaagaagatggcacttgagctgttcaagccattcatcttcggcaagctggaaatgcgcggtctcgcgaccaccatcaaagcggccaagaaaatggtcgagcgtgaactgccagaggtttgggacgttctcgctgaagtgatccgcgaacacccggttctcctcaaccgtgcaccgacccttcaccgtctgggtatccaggcgtttgaaccggtactgatcgaaggtaaggctatccagctgcaccctctggtctgtgctgcgtacaacgccgacttcgacggcgaccaaatggccgtgcacgtaccgctgacactggaagcccagttggaagcgcgcgcgttgatgatgtcgaccaacaacattctgtcgccagccaacggtgagccaatcatcgttccgtcgcaggacgttgtattgggtctgtactacatgacccgtgaagcgatcaacgccaagggtgaaggccgcgtattcgctgacctgcaagaagttgaccgtgtgttccgtgccggcgaagccgcactgcacgccaaggtcaaagtgcggatcaacgaaactgtcaacgaccgtgacggcggcagcgtgagcggcacccgtattgtcgacactactgtcggccgtgcgctgctgtatcaggttgtgccaaaaggcctgtcctacgacgtcgtcaacttgccgatgaagaaaaaggcgatctccaagctgatcaaccagtgctaccgcgtggttggtttgaaagagaccgtgatcttcgctgaccagttgatgtacaccggttttgcttattcgaccatttccggcgtttccatcggtgttaacgacttcgttatcccggatgaaaaagcccagatcatcggtgctgctaccgatgaagtgaaagagatcgaaagccagtacgcctccggcctggtaacccagggcgagaagtacaacaaagtgatcgacctttggtcgaaggcgaacgacgaagtttccaaggcgatgatggccaacctctcgaaagagaaggttatcgaccgtcatggcgtggaagttgatcaagagtccttcaactcgatgtacatgatggccgactcgggcgcacggggttctgctgcgcagatccgtcagctcgccggtatgcgtggcctgatggccaagccggacggttccatcatcgaaacgccgatcaccgcgaacttccgtgaaggtttgagcgtacttcagtacttcatctccactcacggtgctcgtaagggtcttgcggataccgcgttgaaaaccgctaactccggttacctgactcgtcgtctggtagacgttgcacaagatctggttgtaaccgagatcgactgcggcaccgagcacggcctgctgatgacgccgcacattgaaggcggtgacgttgtagagccgttgggtgagcgcgtactgggtcgagtgatcgcccgtgacgtattcaagccaggcaccgaagaaatcatcgttcctgccggtactctggtagacgagaagtgggtcgagttcatcgagctcaacagcatcgacgaagtgattgttcgctcgccgatcagctgcgaaacccgctacggcatttgcgccaaatgctacggccgtgacttggctcgtggtcaccaggtgaacatcggtgaagcggtcggcgttatcgctgcccagtccatcggtgagccgggtacccagctgaccatgcgtacgttccacatcggtggtgcggcaagccggacctccgcagctgacagcgttcaggtgaagaatggcggtaccgtccgcctgcacaacctgaaacacgttgagcgagtggatggccacctggttgctgtgtcccgttccggtgagctggcaatcgctgatgactacggtcgtgagcgtgagcgttacaagctgccgtacggtgctgtgatttcggttaaagaaggtgacaaggtcgacgctggcgcaatcgtggccaagtgggatccgcacactcacccaatcgttaccgaaatgaaaggtaccgtgacctacgtgggcatggaagaaggcatcacgatcaagcgtcagactgacgaattgaccggtatgaccaacattgaagtactcgacgcgaaagatcgtccagctgccggtaaagacatccgtcctgccgtgaagatggtcgatgacaacggcaaggacttgttgctgccaggcactgacgtaatcgctcagtacttcctgccagccaacgccctggtcggtgtagcggatggtgcgaagatcgcgatcggtgatgttatcgcgcgtatcccgcaagaaacttcgaagacccgtgacatcaccggtggtctgccgcgtgttgccgacttgttcgaagctcgtcgtccgaaagaagcgtcgattctggctgaagtcagcggcaccatcgcgttcggtaaagagaccaaaggcaagcgccgtctggtcattaccccgaacgacggtagtgatccgtatgaagagctgattccgaagtggcgtcacctgaacgtcttcgaaggcgaacaggtaaaccgcggcgaagttatctccgacggcccgagcgatccacacgacatcctgcgtctgctgggtgtgagtgcgctggccaagtacatcgttaacgagatccaggacgtttaccgtctgcaaggcgtgaagatcaacgataagcacatcgagaccatcctgcgtcagatgctgcgtaaagttgaaatcgctgaatccggcgattcgagtttcatcaagggcgaccagatggaactgactcacgtattggtagaaaacgaacgtctgggcgcggaagacaagtttgtttccaagttcactcgtgtgttgctgggtatcaccaaggcgtcgttgtccactgagtcgttcatctcggcggcctccttccaggagaccactcgcgtactgaccgaagcagcggtaaccggcaagcgcgattacctgcgcggcctgaaagaaaacgtggtcgtgggtcgtctgatcccggcaggtaccggcttggcttaccacagcgagcgcaagcgccgccgtgatgctgacaagccgctgcgcgtaagcgccagtgaagtggaagctgcactgaccgaagcgctgaactctagcggtaactgagttctgcactagataagtctgggccccggcagcccccattcgtcggatcgaggcatttttgtcccggttcgacgagaggggatgtcggggccttgccttgactgggggcaagatcctctttagactcttgtacccctaaatttggcgggaattcgttcctgccattttgcttttcttgcaagacaatagcgtcgcaagacaacagtggagctagtagatggcaactatcaaccagctggtacgtcagccgcgtaagcgtatcgtcgagaaatccgacgtacctgcgctgcagaactgcccgcaacgtcgtggcgtatgcactcgcgtgtataccactacgccgaaaaaacctaactcggcactgcgtaaagtatgccgtgtgcgcctgaccaacggtttcgaggtttcctcgtacatcggtggtgaaggtcacaacctgcaagaacacagcgtggtactgatccgtggcggtcgtgtaaaagacttgccaggtgttcgttaccacaccgtacgcggctccttggatacttccggcgttaaaggtcgtaaccagggtcgttcgaagtacggtaccaagaagcctaagtagtagcggctttttgcaacactgaatcatctaattttctgagtcgataagagtaaggtcggaggcgtcccgcaagggcaccgattccgaacgaacctgaagaccgtttgagggcttatccatgccaagaagacgcgtagcagccaagcgcgaagtgcttgacgatccaaaatacggaagccaaattctggccaagttcatgaaccacgtgatggaaagcggcaagaaagccgttgccgagcgtatcgtttatggcgcgctggaaaaggttaaagaacgcaagaacagcgaccccctggaaatcttcgagaaagctctcgacgccatcgctccgctggtcgaagtgaagtcgcgccgtgtaggcggtgctacttaccaggttccggtcgaagttcgtccgtcccgtcgtaacgctctggcaatgcgctggttggtagacttcgcccgtaagcgcggcgagaagtctatggctctgcgtttggccggcgagctgttggacgctgctgaaggtaaaggtgctgctgttaagaagcgtgaagacgtgcaccgtatggctgaagctaacaaagctttctcgcactaccgcttctaatcttagcttcactaattttgcgagggctttatggctcgtactactccgattagccgctaccgtaacatcggtatcgtcgctcacgtggatgctggtaaaaccaccaccaccgagcgcgtactgttttacaccggcaaaagtcacaaaatgggcgaggtgcatgacggcgccgcgaccacagactggatggttcaggagcaggagcgtggtattaccattacttctgctgctattaccgccttctggaaaggttccgagaagcagtacaaagacgagcaccgcttcaacgtaatcgataccccgggccacgtagacttcaccattgaagttgagcgttccctgcgcgtactcgacggcgctgtcgttgtgttctgcggtacctcgggtgttgagcctcagtcggaaaccgtatggcgtcaagccaacaagtacggcgttccacgtcttgtttacgtaaacaagatggaccgtgctggtgccaacttcctgcgcgtgatcggtcagatcaagcagcgtctgggtcacactccggttccaatccagttggctatcggttccgaagacaacttccagggtcagatcgatctgatcaacatggaagctgtttactggaacgattccgacaaaggtatggttcctgttcgtaagcctatccctgcagaactgcaggagctggctgacgagtggcgcaacaacatggttgaggctgctgccgaagccaacgaagaactgatgaacaagtacctcgagggtgaagagctcaccaacgcggaaatcaaggctgctctgcgtcagcgtactatcgctggcgagatcgtcttggctgtttgcggttcctcgttcaagaacaagggcgttcccctggttctcgatgccgttatcgactacctgccggctccaaccgacattcctgctatcaagggtaccaaccctgataacgaggaagaagaaatggagcgtcacgccgatgacagcgagccgttctcggctctggcgttcaagatcgcaaccgacccattcgtgggtactttgaccttcgtccgcgtttactcgggcgtgttggcctccggcgacggcgtgatcaactcggttaaaggcaagaaagagcgcgtgggtcgtatggtgcaaatgcacgcaaacgcccgcgaagagatcaaggaagtgcgcgctggtgacatcgcggccctgatcggcatgaaggacgtcaccactggtgaaaccttgtgcaacgctgacaagccaatcatcctcgttcgcatggacttcccggagccggttatttcggttgccgtagagcctaagaccaaggatgaccaggaaaaaatgggtatcgcgctgggcaagcttgctcaggaagatccatctttccgcgtcaaaactgatgaagagactggtcaaacgatcatctccggcatgggcgagcttcacctggacatcctggttgaccggatgcgccgtgagttcaacgtcgaagccaacatcggtaagcctcaggtttcctatcgtgagcgcatcacgaagaactgtgaaatcgaaggcaagttcgttcgtcagtccggcggtcgtggtcagttcggtcactgctggatccgttttgctcctgctgacgaaggtcaggaaggtctgcaattcgtgaacgaagtagtaggtggtgtggttcctaaggaatacatccctgctatccagaagggcatcgaagagcagatgaagaacggtgttgttgccggctatccgctgatcggcctgaaagcaaccgtttttgacggttcttaccacgacgtcgactccaacgagatggcgtttaaggtggctgcttccatggcaaccaagcaactggcccagaagggcggtggtgagttgcttgagccaatcatggcggtagaagttgttacacctgaagactatatgggtgatgtcatgggcgaccttaaccgtcgtcgcggcatgatcttgggtatggaagacacggtttccggcaaagtgattcgcgccgaggttccgttgggtgagatgttcggttatgcgaccgacgttcgctccatgtcccagggtcgcgcaagctactctatggaattcaaaaaatacaacacagctccggcgcacatcgctgaaactgtatccaaaaaacaaggctgattcagtcctttaggcaaggagttaattgtcgtggctaaagaaaaatttgatcgttccctaccgcacgtcaacgttggcaccatcggtcacgttgaccacggtaaaaccactctgactgctgctctgactcgcgtttgctccgaagttttcggttccgcaatcgttgatttcgataaaatcgacagcgcgccagaagaaaaagctcgtggtatcaccatcaacaccgcgcacgttgaatacaactcgctgatccgtcactacgctcacgttgactgcccaggtcacgctgactatgtgaagaacatgatcaccggtgctgcccagatggacggcgcaatcctggtttgctcggccgctgatggtccgatgccacaaacccgtgagcacatcctgctgtcccgtcaggtaggcgttccgtacatcgtggtttacctgaacaaggctgacctggtagacgacgctgagctgctggaactggttgagatggaagtgcgcgatctgctgagcacttacgacttcccaggcgacgacactccgatcatcatcggttctgctcgtatggctctggaaggcaaagacgacaacgaaatgggcaccacgtccgttcgtaaactggttgagactctggacagctacatcccagatccagtccgtgttatcgacaagccgttcctgatgccaatcgaagacgtattctcgatctccggtcgcggtactgttgtgactggtcgtatcgagcgcggtatcgttaaggttcaagatccactggaaatcgttggtctgcgtgacactactgtcaccacctgcaccggtgttgaaatgttccgtaagctgctcgacgaaggtcgtgctggcgagaactgcggcgttctgctgcgtggtaccaagcgtgacgacgttgagcgtggccaggttctggttaagccaggttcggttaagccgcacaccaagttcgaagctgaagtgtacgttctgagcaaagaagaaggcggtcgtcacactccgttcttcaaaggctaccgtccacagttctacttccgtactactgacgtgactggcaactgcgagctgccggaaggcgttgagatggtaatgccgggcgacaacatcaaaatggttgttaccctgatcaaaaccatcgcaatggaagacggtctgcgtttcgctattcgcgaaggcggccgtaccgttggtgctggcgttgtagctaaaatcatcgagtaattatctcttctgagatagctcggttttttgagaaggcccccgctcagcgggggccttttttattgggttgacacctatctggggcgtctatagaattgcgcctccttttaacgggcgtattgcgctcgctgggaatagcagccggagtctgaaatccaatgcaaaatcagcaaatccgtatcaggttgaaggcttttgaccatcgcctgatcgaccaatccacccaggaaatcgtggaaaccgcgaaacgtactggtgcacaagtgcgtggtccaattccactgcctacccgtaaagagcggttcaccgttctggtctccccgcacgtcaacaaagacgcgcgtgaccagtacgagatccgtactcataagcgcgtactggacattgtccagccaacggataaaaccgttgatgcacttatgaagctcgatcttgcggccggtgtggaagtacagatcagcctcggctaagactcgggtcttagtcgtgtaacgctctgaaatgggcggccatagcgggtgaaagccccgtacactcatgaggtttacaacatgactattggtgtagtcggtcgtaaatgcggtatgacccgtattttcaccgaagaaggtgtctccattccggtcacggtcattgagatcgaaccgaatcgcgtcacccagttcaaaactgaagagaccgatggctatcgtgcagtgcaagtcactgtcggcgagcgtcgtgcttcgcgcgtgactgctgctcaagcaggtcacttcgctaaagcaaacgttgcagctggtcgcactgttatggagttccgtctcgaagacggcgactaccaggctggcgatctgatcaacgctgaaatcttcgccgctggtcaactggttgatgtaaccggtcagtccaaaggtaaaggcttccagggtacgatcaagcgttggaatttccgtggccaagacaacactcacggtaactccgtttcccaccgcgtcccgggctctattggccagtgccagactcctggtcgtgtattcaagggcaaaaaaatgtccggtcatatgggcgctgagcgcgtgaccgtgcagtccctcgaagtagtgcgcgtcgacgctgaacgcaatctgttgttggtcaagggtgctgttcctggcgctactggcggcaacctggttgtacgtccggcggccaaggctcgcggttaaggggaagctgacatgcaattaaatgtaaatgacgctcaagcgatcgaagtttccgaactgacgtttggcggcgagttcaacgagacgctggttcaccaagcagtcgtggcctacatggccggcggccgtcaaggtagcaagcagcaaaagacccgttccgacgttcgtggtggcggtaagcgcccttggcgtcagaaaggtactggccgtgctcgtgccggtactatccgtagcccaatctggcgcggcggcggtaccactttcgcagctcgtccacaggatcactcgcagaagctcaacaagaagatgtaccgcgcagctctgcgctccatccttgctgaactcgtgcgtactgaccgtctggtcgtggttcaggatttcgctgttgaaagcccgaaaaccaaagatctgctgggcaaactgaacaacatgagcctgaccgatgttttgatcgtgtccgaagctgttgatcagaacctgtacctggctgctcgcaacctgccacacgttgatgtacgtgacgtgcaaggttccgatccagttagtctgatcgcatacgacaaggtgttgatcaccgtgtcggccgtgaagaaattcgaggagctgctgggatgaaccaggaacgcgtatttaaagttctgcttggcccgcacgtttccgaaaaggctacggttctggctgacaagaaaggccagttcgttttcaaggttgcaactgacgcaaccaagctggaaatcaagaaggccgtcgaaagcctgttcagcgtgaaagtagagcgtgttactaccctgaatgttctgggtaagagcaagcgcactgctcgcggtctgggcaagcgtaatgactggaagaaggcagttatctcccttcagccaggccaagatctcgatttcagcagcagtgctgagtaaggaaggggtgcatcatggcaatcgttaaatgcaaaccgacttcccctggccgccgttttgtggtcaaggtggtcaaccaggagctgcataaaggcgctcctcacgcaccgctgctcgagaaaaaatcgaagactggtggtcgtaacaacaatggtcgtattaccactcgtcacatcggtggtggccataagcagcattatcgtctggtcgacttccgtcgcaacgacaaagatggcatcgctgccactgtcgagcgtatcgaatacgatccaaaccgtactgctcacatcgctctgctgctgtacgcagatggcgagcgtcgctacatcattgcccctaaaggcgtgagtgctggcgaccagctgatcgcaggtgctctggcaccgatcaagccgggcaacgctctgcagctgcgtaacattccagttggtagcaccgtacacggcatcgaattgaagccaggtaaaggcgcgcaaatcgctcgttccgctggtgcttcggctcagctgatcgctcgtgaaggtgtctacgtgaccctgcgtctgcgttctggtgagatgcgtaaagtgctggctgaatgccgcgcgaccctgggtgaagtctcgaactccgagcacagcctgcgttcgctgggtaaagctggtgccaaacgctggcgtggcgttcgcccaaccgttcgtggtgttgccatgaacccggttgaccacccacacggtggtggtgaaggtcgtacctctggtggtcgtcatccggtatcgccatggggcttcccgactaagggcgcgaagactcgtggtaataagcgtaccgacaaaatgatcgtccgtcgtcgcaagtaaatagagggatacgacagtgccacgttctctgaaaaaaggtccttttattgatcttcacctactgaagaagatcgaagtggcggcggaaaagaacgatcgcaaaccagttaagacctggtcgcgtcgttcgatgatcctgccacaaatggtcggtctgaccatcgctgtacacaacggtcgcttgcacgtcccagttctcgtgaacgaagacatggtcggccacaaactaggcgagtttgccggtacccgcacttatcgtgggcacgtggcagacaagaaagccaagcgttaaggggttaggaaatggaagtagccgctaagttgtcgggcgctcgaatctccgcccagaaagcccgcttggtcgccgaccagatccgcgggaagaaggtgggcgaagcgctcaacctgttggctttcagcagtaagaaagccgccgagatcatgaagaaagtgctggagtcggccgtagccaacgccgagcataacgaaggcgcagacgttgatgacctgaaggtcagcaccgttttcgtcaacgaagggcgttcgctgaagcgcatcatgccacgtgccaaaggccgtgctgatcgcatcgtcaagcggtcttgccatatcactgtcaaggttgctgacaagtaacggagtcgaagagatgggtcagaaagtacatcccattggcattcgcctgggaatcgtcaaggagcacacctccgtctggtacgcagacggtcggacttatgcggactacttgttcgctgatctgaaggtgcgtgagtatctccaagacaaactaaaaagcgcgtccgtaagccgtatcgatatccatcgtccggcacaaactgcacgtatcaccatccacaccgctcgtccaggtatcgttatcgggaagaaaggtgaagatgttgagaaactgcgtcaggacctgaccaagcaaatgggtgtgcctgtgcacatcaatatcgaagagatccgcaagccggagctcgacggtatgctggttgcgcagagcgtagctcagcagctggagcgtcgcgtaatgttccgtcgcgctatgaagcgcgctgtacagaacgccatgcgcattggtgccaaaggcatcaaaatccaagtgagcggtcgtctcggcggtgctgaaatcgcacgtactgaatggtatcgcgaaggtcgtgtgccactgcacaccctgcgtgccgacatcgactatgccaactacgaagctcacaccacttacggtgtgatcggtgtaaaggtttggatcttcaaaggcgaagtaattggtggtcgccaagaagaactgaaaccacaagcaccagcgcctcgtaaaaaagctgctaagtaaggggtacgccaaatgttgcaacctaagcgtacgaagttccgcaagcagatgacaggccacaaccgtggtctggctcagcgcggtagcaaagtcagcttcggcgagttcgcgctgaagtctgtagctcgtggtcgtctcaccgctcgtcagatcgagtcagcgcgtcgtgctctgacccgtcacgtaaaacgtggtggcaagatctggatccgtgtattcccggacaagccgatctccaaaaaacctctcgaggttcggatgggtaaaggtaagggtaacgtggagtactgggtagcccagattcagccaggcaaagtcctgtatgaaatcgagggtgtttctgaagagctggcgcgtgaggctttcgccctggctgctgcaaagctgccgctcgccacctcctttgttaaacggacggtgatgtgatgaaagcgaatgaacttcgtgaaaaatccgcacagcagctgaacgagcaactgctcggcctgctgcgcgaccagttcaatctgcgtatgcagaaagcaactggccagttggggcagtctcatctgctctcgcaagttaagcgtgacatcgctcgcgtgaagactgtgctcaaccagcaggcaggtaagtgatcatggctgaagccgaaaagactgtccgtacgctgactggccgtgttgtcagcgacaagatggacaaaaccatcaccgttttgatcgagcgtcgcgttaagcacccgatctacggtaaatatgttaagcgttcgactaagctgcacgcgcacgacgaaaccaatcagtgccacatcggcgacaaggtcactattcgtgaaactcgtccgctggccaagaccaagtcttgggcactggttgatgttctcgaacgcgctgtggaagtctaaggactaggggtcggagaaattatatgattcagactcaatccatgctcgatgtggccgataacagcggcgctcgccgtgttatgtgcatcaaggtgctgggtggctcccatcgtcgttacgctggtatcggtgacatcatcaaagttaccgtgaaggaagcaattcctcgcggtaaagtgaaaaaaggccaagtgatgactgctgttgtagtccgcactcgtcacggcgtacgccgtgctgatggctccattatccgctttgatggcaacgctgctgttcttctgaacaacaagcaagagccgatcggcacccgtatctttgggccagtgacccgtgaacttcgtactgagaagttcatgaagatcgtctcgctcgccccagaagtgctgtaaggagatccgacatgcaaaagattcgtcgtgacgacgagatcatcgtgatcgccggcaaagacaaaggcaagcgcggtaaggtgcttaaggttctcgctaataaccgtctggttatcggtggtctgaacctggtcaagcgtcataccaagcctaacccgatgtcgggcgtacaaggcggtatcgtcgaaaaagaagctccactggatgcttctaacgtcgctattttcaatggcgaaaccaacaaggctgaccgcgttggtttcaaagtagaagatggcaagaaaattcgtgtcttcaagtcgacccaaaaagcggttgatgcttgaacactgctaggtagaagaccatggcacgactaaaagagatttactggaaagaaatcgcaccgaaacttaaggaagaacttaagctttcgaacgtgatggaagttccacgcgttaccaaaatcaccctgaacatgggtctgggcgaagcggtcggcgacaaaaaagtcatcgagcacgctgtagctgacctggaaaagatcaccggtcaaaaagtcgttgtgacttacgctcggaaatccattgctggctttaaagtccgtgaaggttggccgatcggcgtcaaagtgactctgcgccgtgagcgtatgtacgaattcctggatcgtctgctgtcgatctccctgcctcgggtccgcgacttccgcggcctgaatgccaagtccttcgatggtcgtggtaactacagcatgggcgtgaaagagcagatcatcttcccggaaatcgactacgacaagatcgatgctctccgcggtctggacatcaccctgaccaccactgccaagaacgatgatgaaggtcgcgccctgttgcgtgctttcaaattcccgttccgcaactgattggagtaggaccatggccaagatgagcatgaaaaaccgcgagctgaaacgtcagctcacggttgccaagtacgccaagaagcgtgcagcactgaaagcaatcatcgttgatctgaacgcaagtccagaagcgcgttgggaagcaacagttgctctgcagaagcagccacgtgacgcaagcgcttcgcgcatgcgtaaccgctgccgcctgaccggtcgtccacacggcgtttaccgcaagttcggcctcggccgtaacaaactgcgtgaagcggcaatgcgtggtgacgtacctggtctggttaaagccagctggtaagtactttcaacgtcccggtgggcaggatcgcaagatactgaccgccggtggccttgaatctggatcaagccccttttggggcttgtttcatttctggagtatgtctaaaatacgcggctcgcctgagcccgtgttttttatgcccggagattctcggcgacatatgtagccgcaaggctaatttttttgtattaggagcgtctagcccatgagtatgcaggacccgttagcggacatgctaactcgtatccgtaatgcccagatggctgaaaagtccgtcgtaagcatgccatcttccaagttgaaggtagctgttgccaaagtcctgaaagacgaaggctacattgcgggttatcagatcagcagcgatgttaaagcactgctgtccatcgagctgaagtacttcgaaggccgttcggtcatcgaggaagtgaagcgcgttagccgtccaggcctgcgtcagtacaagtccgctgaagatctgccgaaagttcgtggcggtcttggcgtgtctatcgtctccaccaacaaaggtgtgatgacggatcgtgctgcgcgcgctgccggtgtcggcggcgaagttctttgcactgtgttctaaggggggataagcatgtctcgcgtcgctaagaaccccgttaagctgccagccggtgtcgaagtaaaattcgcaggccaacagctttcggtgaagggtgccaagggcactcttgaactgaacatccattcgtccgttgagatcgttgaagaagctggtgagctgcgtttcgctgctcgcaatggcgatcaacaaactcgcgcaatggccggtaccacgcgtgcgttggtaaacaacatggtccaaggcgtaagccaaggcttcgagcgcaagctccagctggtcggtgttggttacaaagcgcaagcaaaaggcacggttttgaacctggcccttggcttctcgcacccagtggattacgaactgccggaaggcatcaccgctgagacccctagccaaaccgacatcctgatcaagggtatcgataagcagctggtaggtcaggtggccgctgagatccgcgacttccgtccaccagagccgtacaaaggcaaaggtgtgcgctacgcggacgaagtcgtccgtcgtaaagaagccaagaagaagtagggcatagcaaatgaccgacaaaaaagttactcgactgcgtcgcgctcgcaaagcacgcctgaaaatgcacgaactcgaagtcgtgcgtctctgcgtgtaccgctcgtcgcagcacatctacgcccaggtcatctcggccgacggcaaccaagtcctggcaagcgcctcgactttggataaagaactgcgtgatggtgccactggcaacatcgacgcggccactaaggttggccagctggtcgctacgcgtgctaaggccgctggcgtctcgcaagtggctttcgaccgctctggcttcaagtaccacggccgcgtgaaagcgctggctgatgctgctcgtgaagctgggctggagttctaagttatgtcaaataacgaccaaaagcgcgacgaaggctacattgagaagctggttcaagttaaccgcgtagccaaaaccgttaaaggcggccgtatcttcactttcaccgcgttgaccgtggtgggtgatggtaaagggcgtgttggcttcggccgtggcaagtcacgtgaagtgcctgctgcgatccagaaggcaatggaagctgctcgtcgcaacatgatccaagttgatctgaacggcaccactctgcagtacgcaatgaagtccgcccatggcgcttcgaaggtgtacatgcagcctgcttctgaaggtaccggtatcatcgctggcggcgctatgcgtgctgtcctcgaagttgctggcgttcagaacgttctggccaagtgctacggctcgactaacccggtaaacgtggttcacgccactttcaagggtctgaaagccatgcaatctcctgagtccatcgctgccaagcgcggcttgactgtcaaggagatcttctgatcatggctaccgttaaagtaacgctgatcaaaagcatgaccggccgcattcctaaccacaaactgtgtgttaaaggtttgggtctgcgtcgcatcggtcacactgtagaagtccaggatactcccgagaatcgcgggatgatcaacaaggcttactacatgctgcgtgtagagggttaatcgatgaaactcaatgatctgagtccagcgccgggttcccgtcgcgaaaagcatcgtccgggccgtggtatcggtagcggtttgggtaagactggtggccgtggccacaaaggtcaaacctcccgttccggtggcaccattgctccaggctttgaaggcggtcaacagccgctgcatcgtcgcctgcctaagttcggttttgtatccctgaaagccatggaccgcgcagaagtgcgtctgtccgagctggctaaagtggaaggcgacatcgttactgtgcagaccctgaaagatgccaacgtgatcaacgtcaacgtacagcgtgtgaaaatcatgctgtccggtgaagtgactcgcgctgtcactatcggcaagggaatcggcgccaccaaaggtgcgcgttcggctatcgaagcagctggcggcaagttcgaggaataaatggctaagcaaggtgctctctcagcgctcggcaaaggcggtatgtctgaactttgggctcgtctgcgttttctgttcctggcgattatcgtctaccgaataggcgcacacatcccggttccaggtatcaacccggaccgactcgcagacctgtttcgacagaatgaggggaccattcttagcttgttcaacatgttttccggcggcgcgctggaacggatgagcatctttgcactggggatcatgccgtacatttcggcatcgatcatcatgcaattgatgaccgccgtcagcccgcagctggagcagttgaagaaggaaggtgaagctggccgtcgcaagattagccagtacacccgctacggcactgtcgtcctcgccctggttcaagctatcggcatgtccgttggtctggcggggcagggcgttgcgttcactggtgactttggcttctatttcgtcgcggtatccacttttgtggctggtgcgatgttcatgatgtggctgggtgagcagattactgagcgtggtgttggtaacggtatctcgatgttgattttcgcaggtatcgtcgccggtcttccgagagcaatcgggcagtctttcgagtctgcacgtcagggtgatatcaatattttcgccttggttgccatcggtttgctggcagtagcgattatcggttttgtggtgttcattgagcgtggccagcgtcgtattgctgttcactacgccaagcgtcagcagggccgtaaggtctttgctgcgcagaccagccacttgccgctgaaagtgaatatggccggtgttattccggcaattttcgcgagcagcattttgctgtttccggcttcgttgggtacctggtttggtcagtctgaaaatatgggctggctgcaggacctctctcagtcgatcgctcctggtcagccgttgaatattctgctgtttagtgcagggattattttcttctgcttcttctatacggcgttgatgttcaatccgaaagacgtagcggaaaacctgaagaagtccggtgcctttattccgggcatccgtccaggtgagcagtcggcacgctacattgatggcgttctgactcgtttgaccctgttcggtgctctatatatgacggccgtgtgcttgcttccccagttcctggtggttgcagcaaacgttccgttctaccttggcgggacctcgttgctgatcgtggtcgtggttgtgatggacttcatgtcccaagtacaatcgcacctcgtttcgcaccagtacgaatccctgatgaagaaagccaacctgaagggttacggcagcggcatgttgcgctgagtacccataaggttcgaggagttggtgatgaaagttcgtgcatcggtgaaaaagctgtgccgtaactgcaagattattcgccgcgaaggtgttgttcgagtaatttgcagcgcggaaccgcgtcacaaacagcgccaaggctgagtgtgatccgcttgaagcccggcagctagtgcgctgccgggttgattatttgttattacagcgatattatctcgcgccctatttcttggcttccggggcgtaggtagctgtcaattggagtcccactgaatggcccgtattgcaggcgttaacattccagataacaagcacactgttatctcgctgacctacatctatggtgttggtcgcactactgcacagaatatctgtgcggtcgctggggtaaacccagccgctaagatcaaggatctgagcgacgagcagattgagctgttgcgtggcgaagtggcgaagttcaccactgaaggtgatctgcgtcgcgaaatcaacatgaaaatcaagcgtttgatggatctcggttgctaccgtggtctgcgtcatcgtcgtggtcttccagtgcgcggtcagcgtaccaagactaacgcgcgtacccgtaaaggtccgcgtaagccgatccgcaagtaatcgcccacgcgaatcgacaggaaaattatcatggcaaaacctgctgctcgtcctcgtaaaaaagttaaaaagacagtggttgatggcatcgcccacatccatgcttcttttaacaacacaatcgtgaccattaccgaccgtcaaggtaacgcgctttcttgggctacctccggtggttcgggtttccgcggttcccgcaagtccaccccgtttgctgctcaagtagctgctgaacgtgctggtcaagctgcgctggaatacggcctgaaaaacctcgacgttaacgtcaaaggtccaggtccaggtcgtgagtctgctgtccgtgctttgaacggctgtggctataagatcgccagcatcaccgacgtgacgccaatcccgcacaacgggtgccgtccgccgaagaagcgccgcgtgtaatccaggagattgtaaagaatggctcgttacattggtccaaaatgcaaactcgctcgtcgcgaaggcaccgatctcttcctgaagagcggcgtgcgcgcgatcgaatcgaagtgcaacattgaagcagcacctggtatccacggccaacgccgcggtcgccagtccgattacggcacccaactgcgtgaaaagcagaaggtccgtcgtatctacggcgttctcgagcgtcaattcagcggctactacaaagaagctgctggcaagaaaggtgcaaccggtgaaaacctgctgcaactgctcgaatgccgtctggacaacgttgtataccgtatgggctttggttcgactcgtgccgaatcccgtcagctggtatcgcacaaatccgttagcgtaaacggccaaaccgttaacgtcccgtcttaccaggttcgtgctggtgacgtggtcgcgattcgcgagaaagcaaaaaaccaacttcgcattgtccaagctctcgatctgtgtgcccaacgtggccgcgtagaatgggtagaagtagacactgagaagaagtcgggcgttttcaagaacgttcctgctcgcagtgatctgtccgccgacatcaacgaaagcctgattgtcgagctctactccaagtaagggctagaaaataggtgcatccatgcagatttcggtaaatgagttcctgacaccccgccacattgatgtgcaggttgtcagtccaacccgcgccaagatcactctcgagcctctcgagcgtggttttggccacaccctgggcaacgcgctgcgccgcatcctgttgtcctcaatgcccggctgtgcagtagtcgaggccgagattgacggtgtgctccacgagtacagcgccatcgaaggtgtacaggaagacgtaattgaaatcctgttgaaccttaaaggtctggctatcaagctgcacggccgtgacgaagttacgctgaccttgtcgaagaagggttcgggggtggttaccgctgccgatattcagctggatcatgatgtcgagatcgttaaccccgatcacgtaatcgctaacctggcgtctaacggcgccctgaacatgaagctcactgtagctcgtggtcgtggttatgaaccggccgactcgcgtcagagcgatgaagacgaaagccgcagcattggtcgcttgcagcttgactcttcgttcagcccggttcgccgtatcgcatacgtggtggaaaacgcccgtgtcgagcagcgtactaacctggacaagctggttattgatctggaaaccaacggtactctggatcctgaagaggctatccgccgcgctgcaaccatcctgcaacagcagttggctgcgttcgtcgacctcaaaggtgacagcgaaccagtggtaatcgagcaggaagacgagatcgatccgatcctgcttcgcccggttgacgatctggaactgactgtacgttcggctaactgccttaaggcggaaaacatttactacatcggcgacctgattcagcgtaccgaagtagaactgttgaagactccgaacctgggcaagaaatccttgactgaaatcaaggacgttctggcctcccgcggtctgtccctcggcatgcgcctcgacaactggccgcctgcaagtcttaagaaggacgacaaggcgactgcctgatcgtcgtaatcaccgaacgtgagtttggtaaggaatgaaccatgcgtcatcgtaaaagtggtcgtcacctgagccgtaccagctcgcaccgcaaggccatgtttcaaaacatggcggtgtcgctgttcgagcacgagctgatcaaaactacactgccgaaagctaaagaactgcgtcgcgttgctgagccgctgatcactttggccaagacagacagcctggctaaccgccgtctggctttcgaccgtactcgttcgaaagctatcgttggtaagctcttcaacgacctgggcaagcgttacgctacccgtgagggtggctacctgcgcatcctcaagtgcggtttccgcgctggcgacaacgcgcctatggcgtacgtcgagttggttgatcgtgctactgccggcgaagctgtaagcgccgagtaagacgacaagctgcaacgaagaaccgggcctagtgcccggttttttgtgggcgtaacaaaagctggctattctctttccttcactgccgtctttcttactgcacccattcaccatgtgcgctggtggttcgttagttattctctatcaaagtccatgatttaatgcatttgatggtgtcatcttgatggtcaatactccctccaagccgattagccggcagttccaagtccgacctgagggaaattgagcatgagccagaataaaatccttactaccgccagcggcgcccccgttgcggacaaccagaattcccgttctgccggcccgcgcggcccgttgctgctcgacgattttcacctgatcgagaagctcgctcacttcaaccgcgagaacattcctgagcgccgtgtgcacgccaaaggttcaggcgcctacggtactttcactgtcacccaggacatcacgaaatacaccagcgccaagctgttcgagtccgttggcaagcaaaccccgaccttcctgcgtttctccaccgtaggtggcgaacgcggttcggctgatacagagcgcgatccacgcggtttcgccttgaagttctacaccgaagaaggcaactgggacatcgtaggtaacaatactccggtatttttcattcgtgacccgctgaagtttcctgacttcatccacactcagaaacgcctgccgcaaagcaacctgaaaagcgcgcaaatgatgtgggatttttggtcccactcccctgaggcgctgcaccaggtcaccattctgttttccgaccgtggcatccctgatggctaccgccacatgcacggcttcggcagccacacctacagcctgattaacgccattggcgagcgtcactgggtgaagtggcactacaagacgaagcaaggcatcaagaaccttgcacctgcagaggctgctcgcctggccggtactgaccctgattatgcgcagcgcgatctgtttggcgcgattgagcgtggtgatttcccgaaatggcgcgtctgcatccagatcatgactgaggcccaggccaacgctcactacgagaacccgtttgacgtgaccaagacctggtcgcagaaggagttcccgctgattgaggttggcgagttggagctcaaccgcaacccgcaaaactacttcgctgaagtggaacaagctgcattcggtccaagcaacatggttccaggtgttggcctgtcgccagaccgcatgctgcaaggccgcgtatttgcctacgcagatgcgcaccgctaccgtgttggcaccaaccaccagcaattgccggtgaacgccccgcgcagcccggtgcacagctatcagcgtgatggttcgatggcattcggcaccaacggtggtgcggctcccaactacgagccgaatagctacgctgatgcgccgaagcaggcgcctcagtatgcagagccagcgttgtcgttgagtggtgtggcggatcgttacgatcaccgtgaagacactgattactacagccacgcaggcgctctgtttcgtttgatggacgccgggcagaaagccttgctgatcagcaacattgccggcgccatggccggggttagcagcgacgtggttcaacgccagttgcaacactttgtcaaagccgatcctgcttacggtcaaggtatcgctgctgcattgggcgtaacaattaactgactctaaacgataagcagaaccgccctcatttgggcggtttttgcgttatttaagctacttttccctgaaaatcttcgcttttctgccgttggtcccgtgaccttcgggtcatgatggttcaaactacagactttcaagcagggagatgtagggcgatgcaaggtcaccccgacgtaatcgattacctcaacacgttgctgacgggcgaactggcagctcgtgaccaatatttcatccattcgcgcatgtacgaagactggggctttaccgagctctacgagcgtatcaaccacgaaatggaagaagaggcacagcacgccgacgcactgatgcgccgtatcctgatgctcgaaggcacgccgcgtatgcgtcccgacgacctggatgtgggcactacggtgcctgacatgctcgctgccgacctgcgtcttgagtacaaggtgcgagccgcactctgcaagggcattgagctctgcgagaagcacagcgacttcgtcactcgcgagatcctgcgtgtgcagttgaacgataccgaagaagatcacacctactggctggaaaagcagctcggtctgatcaagctcatcggcctggaaaactacctgcaatcgcagttctgatttccggctacaaaaaagcccctgtcaccgcgaagtgacaggggctttttattgggcccgagatatcaggcccggtcacgcgccagcaacggtttcaagtagtagcccgtgtgggattgcggcatctccgagacctgctccggtgtgccgacggcgatgatctggccacctttggagccgccctccggccccaggtccaccagccagtcggccgtcttgattacatccaggttgtgctcgatcacgaccacagtattgccgtgatcgcgcaagcggtgcagtacgtccagcaactgctggatatccgcgaagtgcaggccggtggtcggctcatcgaggatatacaaggtcttgccggtatcgcgcttggacagctcacgggacagcttcacccgctgcgcctcaccaccggacagcgtcgtcgctgactgccccagtttgatgtacgacaggcccacatccatcaacgtctgcagcttgcgcgccaaagcaggaaccgcatcgaagaacacccgcgcttcctcgatggtcatctccagggtttcgtgaatgcttttgcccttgtacttgatctccagggtttcgcggttatagcgcttgctcttgcacacatcgcagggcacgtagatatccggcaggaagtgcatctcgaccttgatcaagccatcgccctggcaggcttcgcagcggccacccttgacgttgaacgagaaacgacccggcccatagccccgcgagcgcgactccggcacgcccgcgaacagctcacgaattggcgtgaacagaccggtgtaggtcgccgggttggagcgcggtgtgcgaccaatcgggctttggtcgatgtcgaccaccttatccagatgctccaggcccttgatgctgtcgtgcgcggccgcttccagagtggtcgcgccgttcagggcggtagcactgagcgggaacagtgtgttgttgatcagtgtcgacttgccggagccggaaacaccggtcacgcaggtcagcagccccagcggaatttccagatcaacgttgcgcaggttgttaccgcgcgcgcccttgaggtgcagcgccattttcttgttgcgcggcgtgcgtttggccgggacttcaatcttcacgcggccggacaagtattttccggtcagcgagtcggggtgagccatgacttcggcaggcgtaccttctgcaacaatgtgcccgccgtgaacgccagcgcccgggccgatatcgacgacgtaatccgcaaggcgaatcgcgtcttcgtcgtgctcgaccacaatcactgtgttgccgatgtcgcgcaggtgcttcagcgtccccagcaggcggtcgttatcccgttggtgcaaaccaatcgacggttcgtcgaggatatacagcacgccgacgagaccggcgccaatctggctggccagtcgaatgcgctgggcttcaccgccggacagcgtatcggcgctgcggtccagcgacagataatccaggcccacgttaaccaggaactgcaggcgctcacggatttccttgaggatcttgtcggcaatttcgccgcgacgccctgtcagcttgagcacaccaaagtactcacaggcatcgccgatcggcaggttggtcaccgccggcagtgtcttctcgccgacccacacatgccgtgcctcacgacgcaggcgagtaccgcggcaatccgggcaaggttgggtgctgaggaatttcgccagttcttcacgcacgctcgccgattcggtctcgcgatagcggcgctcaaggttgggcacgataccttcgaacgggtgagagcgtttaacgatgtcgccccggtcgttcaggtatttgaaatcgacgttctgcgagccgctgccatgcagaataactttctgctgctcggccggcagttggttgaagggcacttccaggctgaacttatagtgggacgccaacgacccgagcatctggaagtaatagacgttacgcctgtcccagccgcgtatcgccccctctgccagcgtcaggtcgccattgaccagccgcttgatgtcgaagaattgcttcacgcccaggccatcacaggtcgggcaggcgccggccgggttgttgaaggaaaacagcttgggttcgagctcgctaatggcatgcccacagatcgggcaggcgaagcgcgcggagaagatgatttcttcgccgggctcgtcgtccatcggcgcaaccagcgcaatgccgtcggccagcttcagcgcggtttcgaaggattccgccaggcgctgctgcagatcagcccgcactttgaagcggtcaaccaccacatcaatggaatgcttcttctgcttgtcgagcttcggcgcctcgtccagttcatacagcttgccgttgatgcgtgcgcgtacaaaaccctgggcgcgcagctcttcgaagacggagaggtgttcgcccttgcgttcacggatcaccggcgccagcaacatcagcttggcgccttccggctgggccagcaccaggtcgaccatctggctgaccgtctgggcttccagggggatgtcatggtccgggcagcgcggaatacccacacgtgcatacagcaggcgcaggtaatcgtagatttcggtgatggtacccacggtggagcgcgggttgtgggaggtcgatttctgttcgatggaaatcgccggcgacaggccttcaatggtgtcgacatcaggcttttccatcatcgacaggaactggcgggcataggccgacagcgattccacatagcgccgctggccttcggcgtacagcgtgtcgaacgccaaagacgatttgccggacccggacaagccggtgatgacgatcagtttgtcccggggcagggtcaggtcgatgttcttcaggttgtgggttctagccccacgaatcaggatcttgtccaagatggcctcgcacggcgggcgtaaataatgcaggagtatacggctaaagactggatgaatatacactgccaaagtgccgggtgcagccttagatgaaagctgcgcggcaaagcgccgcatataccctctcaatcgatgggactggtagaatcgccgccggttcacacgaggtttttccatgcacgatccccacagcgaacgcatgagtagcggcgagacccgcgcggcaagcggtctggccctggtgttcgccttccgtatgctgggcatgtttatggtgttgccggtgctggcgacctatggaatggatctcgcaggcgcaacccccgcattgatcggcctggccattggcgcctatggcctgacccaggcgcttttccagattccgttcgggatcatttccgaccgcattggccgtcgcccggtgatttacctcgggctgatcgtgttcgccctcggcagcgtgctcgctgcgcagtccgattcgatctggggcgtgatcgccggccgcgtcctgcaaggcgctggtgcgatttccgctgccgtcatggcgttgctgtcggacctgactcgcgaacaacaccgcaccaaggccatggccatgatcggcatgaccatcggcctgtcgttcgccgtggccatggtggtcggccccttgctgactcgcgcctttgggttgcacgggctgttcctggccacgggcggcatggcgttgttcggcatcgtgatcgtggcatttatggtgccgcgctccaccggaacactgcagcaccgcgagtccggcgtcgcgcgcaaagccttgttaccgacgctcaagcatcccgacctgctgcgcctggatttaggtatctttgtattgcacgcgatgctgatgtgcagcttcgttgccttgcccctggcattggtgcaaaaggccggcctgcccaaggaacaacactggtgggtctacctcaccgcgctgctggtttcgttcttcgccatgatcccgttcatcatctacggcgagaagaaacgcaaaatgaaacgagttcttctgggcgccgtcgcgacattgatgctcactgagctattcttctggcagtttggcgacagcctgcgggcgctggtcattggcacggtggtgttcttcaccgcgttcaacctgctggaggcttcactgccttcgctgatcagcaaggtttcaccggcaggtggcaagggcacggcgatgggggtgtattccaccagccaattcctgggttcggcacttggcggcatcatgggtggctggatgttccagcatggcggtttgtcggttgtgttcctcggatgcgccgggctggctgcactttggctggcctttgctgttaccatgcgcgaacctccctacgtcacaagtctgcgtttgccgctatcgcccgaggcggtccgtgaaagcggtctggtagagcgcctgaaggctgtcgtaggggtaacagatgcagttgtgatcgctgaagaagcggccatttacatcaaattggataccgaattattggatcgcgcgacgctcgagcaactggtcaacccagtgccgacagcgcgcccagcttaggagaacgttatggcccgtggggttaacaaagtcatattggtcggtacttgcggccaggatcccgaagttcgctacttgccgaacggtaatgccgtgaccaacctgagtctggcgaccagcgaacaatggaccgacaagcagaccggccagaaggtcgagaagaccgaatggcaccgtgtgtcgatgttcggcaaggtcgccgagatcgccggtgaatacctgcgcaaaggttcgcaggtctacatcgaaggcaagctgcaaacccgcgagtgggaaaaagacggcatcaagcgttacaccactgaaatcgtggtcgacatgcaaggcaccatgcaattgctgggcggccgtccacagcagggcgatcaacaaggcgggggcaacaactaccagcagtccgctccggccccacgccagcaggctccacgcccgcagcagtcggcaccgcagcagtcgcgtcaggcgccagcgccacagcaggccgctccgcagccggctccggatttcgacagctttgatgacgatatcccgttctagggtccaaccccccgcaacgagcaaaaccctcgatagctaacgcttcgggggttttttattgcccaacatcaggcgtccatcgctgccgcggctaccaccatttccttgaacctgcgcaataccgccgagccgtcgtcgcgccgcgtcgccagatgcaacggcgccaccaggcttcggcactccgtcagctcccggtagacgatgccatccccacgcaatcgctgcatggacgcgggcacaatggacacgcccaggcccgctgccaccaggctcaaggttgccgtcatgcgcggtgcttcctgaaccacctgcgggctgaaccccgcctctcggcaggccaccaggatggcgtcatacagcccaagccccacgcggcgccggtaaagcacgaacgattcagtcgccagcgcggccaagggcagggcgcccgagtcgcgcgccagcgggtggtcagtgggcaacgccaataacatcggctccaccagaatcggctcatcctgcagtgattgcgtcccgctgagtggcgagcgaataaacgccgcgtcgagtttttcgtgtaccagcgcgtccagcagttcgccagtgccggcctcctccagcaccaccgagacgccgacaaaggtttcgcgaaacaaccgcagcacactggggacaaatggatgcagcgcggccgaactggtgaaaccgatcgccaaccgcccgcgttcaccccgcgcagcgcggcggactaaatctgccacgccgtccacctgggcgagaatgcctcgggcttcatccagcaatgccagcccggcggtggtggggcgcacaccacggggcaggcgctccatcaacaccacgcccaactcggcctcaaggctttgcagcaggcgcgtcaggggtggctgttgcatccccagccgttcggcagcccgggtgatatagccttcctcggcgatagcaacgaaggctttaagctggcgcagctccaacatagagatactttccaggtatgggagggcttcaatcctggcatttgttctcatggctcacaagatttaggctgtggccaacctcaaaaagaaggaaagccacgatgacctggtcagccaagcagtacacgatgtttgagcagcaacgtacccgccccgtccgtgatctggtcgcggccattgcgaatacgcaggttcgcaccgccgtggacctgggctgcggccccggcaactccactgaggtgttggccgagcgtttcccagcggcgcacatcacgggtatggacagctccgacgacatgctggtggatgcgcgcaaacgtctgccggcgctgagcttcgagctggcggatatcggcgcctgggcgcctgcacaaacgttcgatgtgatcctcgccaacgcgtccctgcaatggctgccggaccatgccacgctgtatccgcacctggtcgatcaactgacaccaggcggtactctcgccgtgcaaacgccggacaatctggacgaacccgctcaccgcctggcccgcgaagtagcggccgacggcccttggtcggcgaagatcggcgcggtgaaacacaatgagcggcacacggcgagttactatttcgagctactgagcaaacactgcagcaccgtcgacgtgtggcgcaccacctaccagcacctcctggccgaccacgcagcggtggtggagtggttcaaggcgtcggcgctgcggccgtttcttgcgcctttggctgacgacgaaaaagccgctttcctgcgcgagtatcaggcgcggattaccaaggcttacccggctctggccgatggcaccgtgttgctgccattcccgcgcctgttcatcattgcggttcgctaagcctgggcgaaaaagcggcggtcaaaccgtcgcttgccccttcaaaaattcatctgtcgataccacctgcgcgtaggcaaaacccagcgctgccataaaggcgccgtgcgcctgagcggcgggaatcacttgcccgttgaactccaggtcgcgagtggcgcaggcgtcatggatgacggtgacggtgtaacccagatccgccgaggcccgcaccacggcatcgatgcacatatggctcatgcagccggccaccaccacgtcggtgatagcgcgctgttcaagacgcgcgcgcaggtcggtaccacgaaacgcattcacgaagtgtttcagcaccacgggctcatcgccctcgttcagtgctttggcatgcagattcgccccagcggaacccggcgtaaaaaagggggcatcctcggaggtgaattcatggcgtacgtgaatcactgttttacctgttttgcgaaacgcctgaagcacgtcagccgccttgtccgccgcagcctctacgccgtcgagtggccacttgccgccggggaagtagtcgttctggatgtcgatcaagatgagtgcttgcttggccatgaaggctgcctcgggatgggtgaataggctttgtatcttagctggcactccgggcgccgtgcagaatgcatcggggttgatgtgccatcgtgcagaacaaggaaggcacagtgccactgttttttcagcaaacgcttgattttaaaccggtccccgtcaaaaacgccttggcctgatccctgcaaccacccgtctacactcatggcaggatcgccaagggggacctatgaccccgactcatcgcaagaaactggtcgtcgctcactccacgcgtgagggcgcgccacggcacgaagtcgagaccaaccgcgcgttggcgcgctggctggcgcaaatcctcggtctgaaattcggcggcagttatgacccgcaaaaacatgccgggcgtgatctgtacctgctgcccacgcaaacgctggtcggctctcaccaggcgcatgcactcaacatcaaaggcccacacgatttgtggggcggttatgtcgatcacgcgttcatctgcaccaaagccatcagccacggcctgctcagccccgacgcaaaggcacctgagggttggtcagcgttgttcggtgagcgtgtgcgagaggtcgtgcttgacggtctgagcgtgttcgcccttgaggacgcgcttgccgccgccacacgcctcctatacagcgggccggttcgcctgaaacccgtgcatgcctgcgccggacggggccaacaagttatccacagcctcgacgaactcgaagccgtgctggcacgacctgacgcggcgcagctgttcaacgacggcgtggtgctcgagcaggatttgcacgatgtgatcactcacagcgtaggccagagtgttatcggcgatcatgtgttcagctattgcggcgagcaatacctgacaaaagacgggcagggcgaagaggtttacggcggctccaacctgttggttgtccccggcggctatgacgatttgttgaagcttgacctggccgccgacgtgcgcgaagccatcgagcaagcccaggtcttcgatgcggcggccgacgaggcttaccccggtttctacgcatcgcggcgcaactacgacattgcccaaggcctggacagcgacggccaacgccgcagcggcgtgctcgagcaatcctggcgcatgggcggggccagcagcgcggaagtcgcggcgctgcagagctttatcaaccacccgggcctgcgggccattcatgtgtcttcggtggaaacctacgtggaccaggcgctgccggcggatgccatcgaggtgtatcgcggccctgcggaaaacagcgactttcttctcaagtacgtgacggttaaatcttatgacggctagaagcgaaagcattgcgatcgatatcgacgacgaacagatgagcggcacctttctgagccccaaatccaaagtgccgggggtgttgtttgtacacggctggggcggtagccaagaacgggacctggaacgggccaaaggtatcgccgggctgggctgcgtgtgcctgaccttcgacctgcgtggccacgccggcacaggtattccattgagccgcgtcacccgcgaagacaacctgcgcgacctgttggcggcttacgaccggctgctttcgcacccggccatcgacacctcggccgtggcggtggtggggaccagttatggcggctatctggcggccatcctcacctcactgcgcccggtgcgctggctggcgttgcgcgtgccggcgttgtaccgcgatcaggaatggctcaagcccaaacgtgatctggataaagccgacttgatggattaccgcagcaccctggtgcacgccgagaccaatcgcgcgttgcacgcttgcgcgcaatttaccggcgatgtgctgatcgtggagtcgcaaaccgatgaccacgtgccccacgcgaccatcatgagttaccgcgcggcgtgccagcagacgcattcgctgacgcatcgcatcattgatggcgcggaccattccctgagcgatccggtgtcgcagcaggcttacacctcaatcctggtggactgggttaccgagatggtggtgggggagcggttgagcattatccaggctcagtaatgtgttgctcttttggccgccttcgcgagcaagcccgctcccacattttgaattgcattcccctgttggaatgcattcaacctgtgggagcgggcttgcccgcgaaggcgtcagacctttcaacacctgatcagaccggtgtcttcttgacccgcaacgccttcgccttggcctcaacccccaggtacatcaccagcgtaatcagcaacggcgaaataaagtaaatcgcccgatacgcaatcaaccccgccagcaaactgccccgcgacgcttcatgttgcaacagcccgataaacaccgcctccaacacgcccagcccggccggaatatgggtgaccaccccggcaatcgcgctgatcagcagcacccccagcaccagcggatagtccagtttggccggcagcaaggtgaagatcaccgcggccatcagcgaccagttcaacgcgcccagcgccagttgcaaacacgccatgcgcaacgacggcaggttgatctcaatgcccttgaccgaccacgcgcgtttcttcgaaaacctgcaagccgccaggtaccccaggctcaccaacaccaacaacgcaccgatcccctgtagcgccgcgctgctgactttccagcccggcggcatggtcaccagcccgctgctgaacaccacaccggccagtgccatgtagccaaaccagttggtggccaggctcaggccgaggattttggcgatgttgctggtgctgacccccagccgggaatacagccgatatcgcatggcgatcccgccgacccacgcactcaggttgaggttgaacgcatagctgatcacgcccaccggcaggatctgtttccagcccagcggctggcggatataggtgcggccgatcagatcgaagctggcgtagacgagaaaactgcacagcgtcaggccggctgcgatcaacacggtgcgccgtttgaaatcgcccagtgtctggaatacttcgctccagtcgatgcgccgggcgaggagggtgaacagcacgatcagcagcaggaagaaggcaatcgtgagcggtttcttccagcgtttgaaccgtgaggcactgccttcagcggtcatggtttggctgctcgaagggtttcagtcgcggcttgtgcgccggtaaccagcccgtcaatgcggggaaatggcgcatcacatgaaacaccaggaagcccaccgtcaaccgccacagccacaagcgcggcgtgcggttttccggcatggtccggcagtggtcgttggcgagctgttccagccgttcgtaaagctgctgattgaacgcgcggtcgcgaatcagcacgttggcttccaggttcaatgacaggctcaacgggtccaggttgcttgagcctacggtgctccattcgtcgtccaccagggcgactttgccatgcaatgggcgctggcaatattcatgaatcaccacgccatccttgagcaaataatcgtagagcatgcgtgccgccagcttggccagcagcacgtcgggctggccttgcatgatcagttgcacctgtacgccacggcgcgcggcgttgcggatctcgcgcagcaggcgatagccagggaagaagtaggcgttggcgatcaccacgcgtgtttgcgctttgctcaaggcataaaggtaggcttcttcgatgtcatcgcggtgctgcagattgtcgcggtaaatcaggcgcaccaagccgtcgccgttctcggtcgaccacaatgacggccgttgctggcgccgccgccaaccgcgtcgtgtacgcacttggcggccgctttgtgcgagggcgaagtggtgtaaatccgccaccgccgggcccacgacctgcaccgcgtaatcctgcttggcttcggggccgaaatcacccaggtgatcggcagaaaaattgatcccgccgataaacgccacggcggcgtccaccaccacaatcttgcggtgcaggcgccgaaaccagttggtgcgaaagcccagggttttagacgccgggtcgaacatctgcaccgtcactccggcctgcgccagttcgcccagaaatgccgggctcagttcgccgcagccgaagccgtccaggctggcgaccaccttcacgccccgcagcgcggcgtcgatcaggacgcgttgcagctcatggccgaccttgtcttcgaaaagaatgaaggtctccagcaagatctcgcgcttggcctcgcgcatcgccgcaaacaccttgggaaagtaggcttcgccattttccaagagctcaacgcggttgcccggttgccagccgtaatccaggtcgcgggccttggcttcatccgggggctggtcggtggaaatatgctcgacggcaacgttcataactcaatctccaccgacagcggcacgtggtctgacagatgggaccagggccgcgaggtcaacgcccgggggttgtggattttcacgttgcgcacgtagatgcggtccagcgccagcaacggcaggcgggccgggaaggtgcgcggcagtttgccgtgggcttcgatgaaaacttcccgcaggccgcttcggctgaggtcggcgcgctggcgccagtcattgaagtcgccggcaacgatcaacggcgcatcggccggaatctcgcggatgcgctgctccagcaagcgcagttgttgctggcggtgtacctcgcgcaggcccaggtgaatgcagatcgcgtgcacttcctggccggagccgggcaggcgcagcacgcaatgcagcaggccccggttctcgtggccgctttgggaaatgtcgaggttatcgtggcgcacgatctggaatttcgacagcagtgcgttgccgtggtcgccatgggggtaaaccgcattgcgcccataggcgtattgcggccagatgctgtcggcgaggaactcgtactgcggcatgtccggccattcgctatagcgccgggggtggtgctcgtgggtgccgtggatctcctgcaggaacaccatgtcggcgcccacgctgcgcaccgcttcgcgcagctcgggcaggatgaagcggcggttgagggcggtgaagcccttgtggatattgaccgtcagcaccgtgaagcgagtgatggcgacgctgggagtgatgggcacccagtcgggattcgcagccatggttgctcctgaaatagggtgggggcctggcccccgtttatggctgactgcgatttttggctgaaagtttcccgcttcctaccagcggcgcatcagcccgcccccacaggtccttgcttccatagctccttccactgcagggggaacgatctgggcgtaaacccgtcagttccttacagaccctgctgaaggagcccggcgttttgctcaatctcaagactgccttactgcttggcgcactgctgttgttcggcagcggcgccctgcaagccgcgactgccccggcggccacgcccgcgcctgccgccaagcctgagttgctggtggagggcggcctgcttggcgctatcagttccagcatcgacgacgtccaggacaagctcgacctcaatcaaaacctgatcgacgcctggcgcctgcgcgccgatcgtgcggcggatgaagtcgggcggttggtggaccagaccgccgagcgctcgccgtggagcgtggccggggacttccttttgctctcgggggtgtgggtcggcggcttcgctgtgttgacgttgctggggcgttttttcgtaaggcgcttgagccggcgcgcgtttgtcgagcgccgcgggcgcctgcaagccgtactcggctatgtggtgccctacaccattcctgcgctggtatgcctgccgctgacgctgtatgtcagccatttcctgcctacttcggtggggcgtgcgctggcgctgtgtttcgcctatgccaccagcagcggcatcttttccacctcgatgctgttgtgcgtgatcgtcatgttcaacgtcggccacaagcgcccggccgtgcagataattcgcagctactgccccaagccgctgttccttatcggcttcctggctgccctcagtgatgcgctgaccagcccgcaaatcgcccgccagctgggcggcaatatcaccagcagtatcgcggtgttcaccggtttgtttgcggcgctgattttcggaatgctggtgattcgcctacggcgcccggtggcgcatctgatccgcaaccggccattgaatcagcgccttaaacacccggcgttgcagcagtctctgcggatattttccgggctgtggtactggccgattctattgatggtgctggtgtcggcgatcaacctgatcggtgctggcgacgataaccagaaagcgctgcgctgtgcgctgttcaccacgattctgttgatcggcacggtgtttctcagcacggtgttgcagcatctgttcaagtcccgcagccaagtggcgatccagcgcagcagtgcttacaaggagcgtttcctgagtttgttgcacgcgatcttgcgtattgccatggccattgcctttatcgaaatcctcgggcgcatctggggcgtgtcactgttcgagtttgcccagcgcaactcggtgggccgcgcaatcagtgactccctgagcagcatcggcctgatcctgttgatgacctggctgttctgggtagtgctcgacacggccatccaggaagcgctgaaaccgccggtgaataaacgctccagccgccaacccagcacgcgggtgaaaaccatcctgccgctgctgcgcaatgcggtgaaaatcatcctggtggtgatttgtgcgatcaccaccatggccaaccttggcatcaacgtcgcgccgttgttggccggtgccggtgtggtcggcctggccatcggttttggttcccagcaactggtacaggatgtgatcaccggcctgttcatcatcatcgaagacaccctgtccatcggcgactgggtggtgctcgactccggccacgcaggcaccgtcgagggactgaccatccgcaccctgcgcctgcgcgacggcaaggggttcgtgcactcggtgccgttcgggcagatcaaggcggtcaccaaccagtcgcggcaatttgcctatgcattcttctcggtgcagttcacgtatgacaccgatgtggacaaagcggtggagctgatccgtgacgccggccagtcgattcgtgatgacgtattcctcaaatacaacctgcaagggccgctggaggtgttcggggtcgacaagatggaccttaatggcgtggtgctgacggcccagttccgtacggtgtcgggcgggcaatatgcggtgagccgcgcgtttaaccagcggctgaaaaagcttgtggataactgtgacgaggtgcacttcgcgcaaacttatccacagcaggttttactgcccaagcgtacgccccaggtggatgagccggatgaagcggcgccagcgccggtggtgctgaccgagcagccgcgtacccaatgattgataaggccccatcgcgggcaagcccggctcccacatttggcggtgtgaacccgtccaaccgtgggagctggcttgcctgcgatgaggccggtgatcacggcttaaaactccagtggcgccggatacaacaagttgcaaccacatactttatccgtgacggttgcgcgacaaacccgcaaaatgcaacgattcttacaaatacctagataaccatcgttccaacagaccgggcctgcttaatttatgcgaatgcgccttatgttattgggcggcgggaatgccctcgggcaggcgctgattcgcctcggtgcagaggaagacattggtttcctcgcacccaaaccgccccaagacggctgggatgccgcgagcctcacccaattgctcgacgacacccgtcccgatgcgttgatcaacctcgcctactatttcgactggttccaggccgaagccgtcagcgaaacccgcttggctgcccaggagttcgccatcgagcgcctggccgaactgtgccagcaccacaacatcacgttattgcaaccgtccagctaccgcgtgttcgatggctcccgcgccacggcctacagcgagaaagacgagccggtgcccctgggcctgcgcggccaggcgttgtggcgcatcgagcagagcgtgcgcgccacctgcccgcaacacgtgttgctgcgttttggctggttgctggatgacagcgtcgacggcaccctcgggcgctttctggcccgggccgagaagcctgatgaattgctgatggcggacgatcgtcgcggcaatccgacgccggtggacgatgcggcgcgggtcatcatttcggtgctcaagcagctcgattgcgccgcgccgctgtggggcacttatcactacgccgggcatgaggcgacgacacctgtggcgctgggccaggcgatcctcactgaagcgcgcaacttccatccgctggcgatcgaagcccccaccgcccaggcccacgccgctcggccggacgcggcggatgagccgcaacacgcggtgctggcctgcaagaaaatccttcacaccttcggcatcaagccacgggcgtggcgggcgggcttgccggcgttactggatcgttactaccgacatagctgaggttcggccctggcgagactgatgctgaatgttctcgccaaggtctgctcccgtttacctcgcggcaacgatcttcaggttgcagtacgacttcaacccttcagccccaaattcaaccccgaaacctgattccttgtgccccccaaacggcacatcggcggacaggctcgcgtgctggttgatccataccgtccccgcgttcaagcggctggcgacctgggcaagctgctcgctgtcgttgccccacaccgaggcacccaaaccgtagcgggtgtcattggcacggctgatcacgtcgtccaggccgctgtatttcatgatggcgcgaatcgggccgaacacctcatcgcgaacaaagtcagcgtcgtccggcgggttatccagcaaggttaccgggaagaagtaaccggcatcgggggcttcaccctgataaagcactttggcgccactcgcctggatttgcgcccaggtcgcgcgaatcttttcgtactgcattttgttctggattggcccaagggccgagtccggagcaaagccatcccctgttttgatatgagcggcgtaagccaccaatgcctgggtcacttcggcataaatggactcatgcacatacagacgtttcaggcagatacacgcatgcccattgagcatgaacatgctccagaacaacgattcggcaatcttttgcgggtcggcgtctggcagcacgatggcagggtcattgccccccaactccagggtcaggcgcttgagcgtgccggccaccgagttcatcacgcgcttgccggtgtggctcgacccggtgaagctgactttgtcgaaacccgggtgcgaggtcatcagcggccccagcgcatcgccgccggtaatcacgttgagcacgccgggcggcagcagatcgagggcatatccggcgatgcgcaagaccgtcaggggcgcgtacggcgaaggcttgagcaccacggtgttgccggtgaccagcgcggcgaggattttcatcatggccaacagcgcgggcacgttccacgggcaaatcgcacacaccacacccagcggcgtgtagtggcgggtcacgcggcccatgaacggcgagtcagccgattcggcgggcaactcgagattcaccagggccggaccaaacgcgtccgtcagcgcggtcagctcccacgtcgaggtggccagcggccggccgtgctcggcggtgagcagcgcggtcagctctggctcgtgggcttttacccgcgcgatgaactcgatcaacagcgcgcgtcgctcggccacgggcgtcgccgaccaggctggaaacgcttggcgggcggcagccacggcgtcgttcaaagcctcttcgccagcgtccggaacggatgcaatcacttcacctgtcgcagggttcaccacgtccagtgagtggctgagtgaggttcggtgcccattgatgaaattgaaaaagccaccgtccagattggcctgtttcaacaacgtttcacgagtgtgctgtggacctgaaaaatcagtcgccgtcgtattcatggtgagaacctcgttccttttttgtttgaaatcgaatcgctgtgaacaggtattcgaaatcggccagggggtgctgacatcacccgcttagaaggaacacccgcattcgaacattcattccataaacaaaaaattaaataaggcggccttgcgacgatagccaattgcctgcggccccataaaaaaggccctgtaaaaacagggccttgaattgaaagctggcgtggataaaacctagaacttgtagccgatacccaccatgtacaccatcgggtcaacgtctacattcactttggcgcgcgtgccctggcccagcgcgttgttgtccaccgtcgccttggtgctgatgtcgatgtagcgcgcctgggcgttgatcatccacttgtcgttgatcatgtagtcggcgcctatctgtgcggcccagccccaggagttctcggccttgaagttgctgaaaccggcttgctcggcgcggctgccgacgtgctcgtcgtagatccaggtgtagttgataccggcgcccacgtacggttggaaggcggacttgtggtccagcgggtagtacacgacgctcagggtcggcggcaggtgtttcagggtgccgagcttgccgttggcagcgcccagcgcggtgttcttgatcttcacgtcgtgttcgaacggcgtggcggccagcagctcgatacccacgtggtcggtgatcatgtaggcgaagttcagccccagttgcgtgtcgctgctcatggtcgccttgccgcccaggttggtgccggccagcgggccctggtcaaccttgacgctgctgctgtcggccttcggattcacggtgattgcaccggcgcgaatcagaatgtcgccggcttcgtgtgcctgtacggcaggggcggcgagggcgagcgcgaagagggacgcgccgagcagggacttgttcatgggagctccaaaaggacgttaaaagttgtacgtccaatggtaaagatcgttccgtccgatcttttgactcagctcaatgaaagggtaaacgcagatcaaaaactgtgggagcgggcttgctcgcgaaagcggtgtatcagtcagcttatcagtcactgacccacggctttcgcgagcaagcccgctcccacatggaattttcagtgttcttgaatacgggttattcctgcaattcgtagacgtaaatcttctctgcatccatctggtaacccgcgtcggccagctcgctggtcgacgctttgacctgcatcgcaccctcgacccaataaggctgatacagctcatcgagcttcacgccgacttcgcttttcacatgtacgatctggttcgacggcggaggcggcacgtgaatgcacgcgccgaaatacggcaccagcaaaaactcggtggtgcggccttcttcgctgacctccagcggcacgatatagcccggcaagcggatgtgcttgccgtcgaggctctgcaccaccggcgcgttgggcaaatcctgcttggccgctggcgctgcctcgaccgacaaggcatcggccatgttcgacaggtcgtgcagcggcttcatgttagggatttccggcggggcatccggcgggatcatttcctgccacgacagatccttgggctgctcatccgcccacacgggcacagccaccaccagcaataacgcaaacagcgcacgacgcatcgaagccttcctcataaacgtatggacaggccgtcggccagggattgccgataggcgcgccacgcgggcacggcgcccatcaacagcgctgcggcgaggataccggcgagcagcgtccattcatattcgctgggccacgacatcggcaaatccaggccatagttggcctgtaaatacccgcgcgaggcggcgatgcacacatacagcaggcccacacccgccaccacgccggacagcgccagggcgaaggcttcgaagatcagcagcgtcgcaatgtgccacggccgcgcgcccaccgagcgcagaatcgccatctcgcggcgacgctcgttgaggctggtgaggatcgccgtgagcatgccgatcaaaccggtcagcaccacaaacagcgagatcacgaacaacgctttttcggcggtgcccatcatgctccacagctcttgcagcgccacgccgggcaggatcgccaacattggctcgccacggaattcgttgatttcccgttgcagcgcgaaagtggaaatcttgttgttcaggccgagcatgaacgcggtgatcgcctgcggcgtcaggtccatattgcgtgcctgatcggcgctgatgcggcctttgccctgggccggcacgccgttgtgccagtcgatatggatcgcctccatgccgccgaggctgatgtgcagcgtgcggtccacgggcgtgccggtgcgcttgagaatgccgaccacggtgaagggtttgtcatcgtgcttgaccaggctgaccaccgccacgccgtgggccagcaccagcttgtcgccaagcttgtagtgcaacgcatcggcgacttcggcgccgagcaccacttcgaatgggtcggtagcgaaagcgcggccgctggccagctcgaggttttgtttgcggccgtattggtagtgctcgaagtaggattcgttggtgcccatcacgcgataaccgcgatgggagtcgccgagggaaatcggaatcgcccatttcacctgcgggctggcggcgaagtgctcgaagctgtcccagcgaatgttgttggtggcgttgccgatgcggaacaccgagtacaacaacaggttcaccgaacccgagcgcgcgccgacgatcaggtcggtgccgctgatggtgctggcgaaactgttgcgcgcttcaacgcgcacacgctccaccgcgagcaacaagcagacggacagcgcgatggcgaacgcagtgaggatcgcggtaaagcggcggttagccaggctggccatggctagacggaacagatacatctcaaacctctgcgggcgtggcggcgcgattgagttcggccagcgacaggtggcggtcgaacagcggcgcgaggctctggtcatggctgacgaacaacaggctggcgccggcctcgcggcactcggcgaacagcaggcggatgaaggcttcgcgggcgtcgtagtcgagggctgaagtgggttcgtcggcgatcaccaactccggctggccgatcaacgcacgggcggcggccacgcgttgctgctggccgatggacagcgagtcggcacggcgttccagcaagcccttgtccttcaaacccaagtgcgcgagcaaggtcgcggcagcttgatcgacgctgccatggcgctgcttggcccgctgagcgcgcagtttggaaaagtggcagggcagctcgacgttttcgcgcaccgacagaaacggcagcaggttgaactgctgaaagatgtagccggtgtggtccacgcgaaagcggtcgcgggcgccggcgccgagttcggttagttcctggccaagcaggcgaatgctgccctggctgggtttctgcacgccgccaagcaggccgagcagggtggttttgccactgccgctggggcctttgaggaacagggtttcacccgcttccaggcggaaggcggggatgtccagcaactgtgggtgaccgggccagttgaagcccaggtcgtgcagttcgattaacgcttgggtcatgggaaatcatcggtctcagaaacgggcgccaacccctgtgggagctggcttgcctgcgatagcgatctatcagtcacatcattgctgactggcccaccgctatcgcaggcaagccagctcccacattgaccgcattgtcagatcagaatttcagcgtggcggcctgggccgtcgcttcaacaccttgctggccgctcggcccgatcagttgtacctgaattttctgggtggcggggaaggtcttgaacacctgggtcaggtcgaggttgctcagcgccgtcggcgtggcgcaggtgaactggtagtgggcgtggatttcgctgtggtcgtggtgatgctcgtgggcggcggcgcctttgccgtcggtggcgtggtcatcatcgtcgtcgtcatggtcggcttcaggcttgtcgccgaacagcgggctgttcagttcctgagtgctgatcacgcaaccggcgcccttgggcaggttgaacagggccaacgggttttccagttgcttgcgggcggcggcaactttggctttgtcggcaggggtggtggcttgatgttcgaaacccaccaggttcatggccgggctgtcgaattccagctccagggcctggccgtcgagcacggcgttgaggcgacccacaccatgttcgtgagcaccaaggctgccgtgctcgtgttcatggtcgtgctcatcggcagcctgggcaatggcgagtggcaacagggcaaacggcaaagcgagcagcagacggcgcatgagaaggctccagaacatgaaagttttgttatgtgatcttataacaataatgacaggagtttgaacgcccgcttggcgttgcgcaagtcgcgtgggagcatgcttgtcggaaaagtgcgggagtgaacgcgatgttacgaattcgtggaaccgtcggcgacctgccggtggacctgaccctggagctggacgacggcgattgggcacggctgggcgcgcagttgcaggcggcccctgtgcaagccgcgccggctgcggcccccgtcaaacacaatgatgacctgtggcagaacgcccaggacctgttgcgcaaagccgggcagctcagcggccttgagttgagcgatcaactggaagggttggccggcgatgccgcctcaggcaagcggctgttggtgcgcctgcgccacagctcaaacgtgaaagtggccagcggcgtggatacgccgctgtacagctgggtcggcgattagtacagcgcagcgaacagcttgcggcggtacacggtcaccagcgggtggtcgttgcccagcagttcgaagacttgcagcaaggtcttgtgcggcaagccttcgctgtagctgcggttgcggataaacagcttgagcaggccttccagcgccgcgtcgtattgctggcgggccagttgctggatcgccagctgataggctgcttcatcgtcctgcgggttttgccccaagcggcttttcaggtcggcagcgtccggcaggtcggcggcctggcgcaggaaggtgatctgcgccttggccccggcgagggcggctttgtggtcgtcgcttttcacggcgtcgagcacggtttgggcttcacccagctcaccgcgttcagccaggcagcgcgcgtacaggatcagggcggcggcgttggtgttgtcttcgcccagcaacgcaaccagcacggcttcggcatcgctgatgcggccttcggcaaacaacgcctgagcctgttccagcggatctgccgcagccggtggcggcatctttacgtgaggttccagcagcgcgcgcacggccgactccggctgcgccccggcaaacccgtccaccggctggccatccttgaacagcaccacggtcggcaggctgcgaatgccaaaccgcgctacgatgtcctgttcggcatcgcaatcgaccttggccaacagcaactcgccctgatagctctcggcgatttgcgccagcatcggcatcaacgccttgcagggcgcacaccactcggcccagaaatccaccagcacgggtttttcgaaggagttctgaatcaccgcctgatcgaacgtggcggtggtggcgtcgaagatgtagggcgtgggctcactcatggggcgtctcgaataaagcgggaatggggcaactataagggctggcgcggttggctgaaagcgcggtgttcttgaggtcatcgcgggcaagcccgctcccacatttggactgcatcggcctgttgaaatgcattctcctgtgggagcgggcttgcccgcgatggcctcacagacgccgcgaatggtacagactcaccttgcgaaactcccaaggctcagccagatccggcaacgtaagggcatcgaggatttccaggcgctgataggccgggtgctggaagtcacgaacccgcgaatctgccaccagcgcctcgcggccacggctgaggaagtggtccagcagtggcaggttggcgcggtcgtaaagcacgtcggccaccaggatcaggtcaaaacgatcagcttctgcgaaaaagtcggccgaataattcagcttaacctcattaagttcggcattcgcccggcaggactcaagcgccagcgggtcaaggtcgcaggccaccacttccagcgcgcccgctttaacggcggcaatccccgccacaccggagcccgcgccgaaatccagcactcgcttacccgcgacccactcggggttcgccgccaggtaccgcgccagtgccaggccgctggcccagcaaaagctccagtagggcggctcatgcaggatgcgtcgggtttcgtcctggctgaaggcgcggtccatgttgtcggcatccagtaaccacaacgacagcgcggtgcccggcagaaggcagggcaccaggcgcgcgtcgccgatcagttcactcagtgccgtttgcaggcccagcggtggcgtcatggtgccttgacgagctgcaaagggccggtggtctgggtaatcgcctgggtgatgcgcacggcgggcaggtgcaggatcaactggccggactggctggcgcggccacgcaattcaaccctggcaccggccgggaaggcttcggggttgaagcgcaggcggaaggccacgggcttgccgttgccggtcaacacgctgctggcgagcagttgctgagggcggttgcgctcgtcgatcaccaacaacgccagttcaacttcggcattggcgggcacgccattgaggatgccgctgatttcacgttgaaacgccggcaatgggccgaggtcttcaatgccgggcacttttttctcttgtgccggggtgggttgaggggcggcaggcttgggggcttcgctgctgcaggcgaccagaaaactgaacagggtgagcaaaacgagtggtcgtaactgcatgtacggctccagaaagggcaaaatccgtgactttgaaataaacaaacatagtaagcctgcctatataccgtaaaggctatggcttgtcttgccacggggatgcgctaccatggccctccctttatttgttgcctgccaaccatgcactgtcccttctgcggtgccaacgacaccaaggtcattgactcgcgtctggtcgccgagggcgatcaagtgcgtcgccggcgcgaatgcctggcctgcggtgaacgtttcaccaccttcgaaaccgccgaactggtgttgccacgtctgatcaagtccgacggcagccgccagcctttcgacgaagaaaaactgcgcgcgggtatgcagcgcgccctggaaaaacgcccggtgagcgtcgagcggctggaagcggcgctggtgcacatcaagcacaagctgcgtgcgaccggcgagcgcgaggtcaagagcctggtggtgggagaactggtgatgggcgagctgcaaaagctcgacgaagtcgcctatatccgtttcgcctcggtgtatcgacgcttccaggacctcaatgagttccgcgaagagatcgaccgcctggcccgtgagccggtcaaacaatgacgacaccttctgctgaacaagccgtactcgacgcccattacatggcccgcgccctcgaattggcgcgcaaaggcttgtacaccacccatcccaacccgcgggtaggctgcgtgattgtgcgcgatgggcagattgtcggcgaaggctggcacgagcgcaccggcgagcctcacgccgagcccaacgccttgcgtgctgctggcaacaaggcgcgcggcgccacggtgtacgtgacccttgaaccctgtagccaccacggccgtacgccgccgtgcgccgatgcgctggtgagcgctggcgtggcgcgcgtcgtcgcgggcatgcaggacccgaaccctgaagtggcggggcgcggcatgcagcgtctggcccaggcggggattgagattcgcagcggcgtgctggaaaaagaagcacgcgcgctcaaccccggttttctgaagcgcatggaacacggcctgccgttcgtgcgggtcaagctggcgatgagcctggacggtcgcacagccatggccagcggcgaaagccaatggatcaccggcccggctgcccgcgctgccgtgcaacgcctgcgtgccgaggccagcgtggtgctgaccggcgccgataccgtcttggctgatggcgcgcgtttgaccgtgcgcgccgccgagctgggcctggatgaagaaaccaccgcgctggccatgtcgcgtccgccgctgcgcgtgttgattgatggccgcttgcgcgtgccgctcaacgcgccgttcttcaaggccggcccggcgctggtcatcacctgcgtgaccccggaaaatcaatttccccgtggccccgagtgcctggtggtgccgggcgtcgatggccaggtcgacctgcgttcggcactcgtggcgctggccgcccgtggcgtcaatgaagtgctggtcgaagccgggcctagtctggcaggcgcgtttgcccagcaggggctggtggacgaatacgtgatattcgtcgccggcaagtttctcggctccgccgcccggcctttgctcgactggccgcttgagacactggccgacgccccccaactcaagatcactgaaatgcgcgctgtgggcgacgactggcgagtcactgccatcccgctaccatccgcgagcgtataattctgaccgggcgcccaactgccccgtaccgttttccaggagaaggccatgttcaccggcatcatcgaatccatcggcagcatccgcgccatgacccccaaaggcggcgacgtgcgcctgctggttgaaaccggcaagctggacctgggcgacgtcaagctgggcgacagcatcgccgtcagcggcgtgtgcctcactgtcatcgaactgccgggtaacggttttgccgccgacgtcagccgggaaaccctggactgcacggcgatgaatgacctcaaggccggcagcccggtcaacctggaaaaagccctgaccccgaccacccgcctgggcggccacctggtcagcggccatgtcgacggcgtcggtgaagtggtcgcgcgcagcgaaaatgcacgcgccgtggaattccgcatccgcgcgccgaaagagctggccaaatacatcgcccataaaggctcgatcaccgtcgacggcaccagcctgaccgtgaacgcggtgaatggcgccgaatttgaactgaccatcattcctcacaccctcagcgaaaccatcatggcttcgtaccagccaggccgccgggtgaacctggaagtggacttgctggcccgttacctggagcgcctgttgttgggcgataaggccgcagagcctactgccgggaacattactgaaagctttttggccgccaacggctaccttaaatcctgacccaagggggtgccgcgtggcgctcaacagcatcgaagaactggttgaagacatccgccaaggcaagatggtcatcctgatggatgacgaagaccgcgagaacgaaggcgacatcatcatggccgccgaggcctgcaagcctgagcacatcaacttcatggccaagcacgcccgcgggctgatctgcatgcccatgagccgcgagcgctgcgagttgctcaagctgccattgatggcgccacgcaacgggtcgggtttcggcaccaagttcaccgtgtccatcgaagccacgacgggcgtcaccaccggtatctccgccgctgaccgcgcgcgtaccgtgcaagccgccgccgccaaagacgccaaggccgaagacattgtcagcccgggccacattttcccgctgatggctcagccgggcggcacccttgcgcgtgccggccacaccgaagccgcctgcgacctggcgcgcatggccggtttcgagccgagcggcgtgatctgcgaagtgatgaatgacgacggcaccatggcccgtcgcaccgaactggaagcgtttgccgccgaacacggcatcaagatcggcaccattgccgacctgattcactaccgcatgatccacgaacgtaccgttcagcggattgccgagcagccgctggacagcgaactgggccaattcaatttggtgacctaccgtgattcagtggaaggcgacgtgcacatggccctgaccctgggcagcatttgcgccgaggaaccgaccctggtgcgcgtgcacaacatggaccctttgcgcgacctgctgatggtcaagcaaccgggccgctggagcctgcgcgccgccatggccgcggtttccgaggctggcagtggcgtggtgctgttgctcggtcacccgttggatggcgatgtattgctcgcccatatccgcgaaaccgccgaccacacgccggtgaaaaaaccgaccacctacagcatcgtcggtgccggttcgcagatcctgcgcgaccttggcgtgcgcaaaatgcgcctgatgagtgcaccaatgaaatttaatgcgatatccggtttcgatctggaagttgtagaatacgtgccctccgaataaaggccggcgatttttgccccttgttcgcggttaacacatcactgagggacgcacttttcgcgtccctgctctttaagagatttgtcgaatgaccctgaagaccatcgaaggtaccttcatcgcccccaaaggccgctacgccctggtagtcggccgtttcaacagcttcgtggttgaaagcctggtaagcggtgccgtggacgccctggttcgccacggtgtgagcgaaagcgatatcaccctgatccgcgcccctggcgccttcgagattccactggttgcgcaaaaagttgcccaacagggtgaatacgcggcaatcatcgccctgggcgcggtcattcgtggcggtactccgcacttcgaatacgtggctggcgaatgcaccaagggcctggcccaggtgtccatggagttcggcgtgccggttgcgttcggcgtactgaccgttgactccatcgagcaagccatcgaacgttccggcaccaaggccggtaacaaaggcgctgaagctgccctgtccgccctggaaatggtcagcctgctgtcgcagttggaggccaagtgatttccgacgagagcgacaacttcaacccgcgcgaaccacgcccagccgatgccggcaagccgtccaagaacgaaaagcgtcgcgctgctcgtcaattggccacccaggcgctgtaccagcgtcacctggccggtgcctcgctgaacgaaatcgaagcgcagtttcgcgtcgataacgacttcacctttgccgacctgccgtacttccacgacatcctgcacggtgtgcatgcgcacctgaccgagattgatacggccctggcgccttgcctggacctgaccatcgaagagctggacccggttgaactgtgcgtgatgcgcctgtcagcctgggaactgctgtatcgcgtcgatgtgccgtaccgtgtggtgatcaacgaaggtatcgaactggcgaaagtctacggttcgaccgacggccacaagttcgtcaacggcgtgctcgacaagctggccccgcgcctgcgtgaagctgaagtgaaagcgtacaagcgctgaatgggcgagtttgagctgatccgccagttcttcgccgccgcgccctgtgcgcaaggcggcgagggcattgcactggggatcggcgacgactgcgccttgctggcgctccccgccggggagcagctggcggtttctaccgatacgctggtggccggcgtacatttcgccgacccctgcgatcccttcctgctcggccagcgctcgctggctgtggcggtcagcgatctggccgccatgggcgccaaccccctcgcattcacccttgcactcaccaccccgacggtcgaggccgactggctgcaacgctatgcccagggcttgaacgccatggcgcaaagctgcggcgtgagcctgatcggtggcgacaccacgcgtgggccgctgagcctgaccctgaccgtgtttggccgcgtgccggccgggcaggcgttgacccgcagcggtgcgcagccgggcgacgtgctgtgtgtgggcggcgaactgggcgatgccgccggcgccttgccgttggtgctgggccagcgcagcgctgaggccgccgtcgccgaaccgttgctggcgcattactggtcgccgcaaccgcagttggcgctgggcctggcgttgcgtggcagggcgacgtcagccatggatatttctgacggcttattggccgattgcgggcacatcgccaaggcctcggcagtcagcctggtggtcgagcgtcagaagctgccgttgtcagcggcattgctggcgtttgtcggcgatgacgcggcgcgtgtggccgcgttgagcgggggcgacgactatgtattggcgttcaccctgccacctgcccagctggcgccgttgctggcgggcggctggccaatccacgtgatcggccgggttgaagccgggcagggcgtcacgctgcttgatgccaacgggcaagacatcacccccgccgtgcgcggctaccagcattttcgcgacaccccctgaatcgcagacctgcgctaccctctataggttcttgtgctgcaggaggttgtcgctatggatgtgcgccgctggctgctggtcgggttgtgcgcagccgtttcgctggtgcaggccgaagaaacccgggtgccgggcaaggtgatgctggccagtgaggaatggaacgactacaccaacaaagacggcagcggcctggcctgggatgtactgcgccaggtgttcgaacccgcgggtattaccctgcaaacccgcagcgtgccgtatacccgctcggtcggcctggcccagcgcggtgaggtggacggctgggtcggttcctaccgcgacgaagccagcgacgtgctctacccgcactggaatttcgactccgatcacatctacgccctcgggctggcaaccacgccgacgccgagtatcgccacgctgggcaactaccgcctggcctgggtgcgcggttacaagtacgaggagtacttgccgaatgtgcaccgcttcaaccagatcgaacggcgcgacggcattttgccgatgctgcaacacggtcgggccgacttctacatcgatgcccacaccgaagccaaatttgtcctgagccagtcgggcaacccctcgcaattcaagctcacccacatcgccgaactgccgctgtacgtgggctttgccgataacgaccgtgggcgggcattgatggcggtgtatgaccagcgcatggccgcgctggtcaaaagcggcgagctcaagcccattttcgagcactggaagcagccgtatccgttctgacctgcatagaaccgggacgaaggccaatcgaacctattgatctttatcaacgataattcagcttaagcgtctgtaggaacctgctgttacaatgacgccctctgtgaaatctgaaatcaggagcacacggtgcccgtcgttttcgtcgccgcttccaagctgcctaccccttttgccacgttcaccatgaacggctttctcgaggaagccaccggccgcgagcacgttgtgctcagcctcggtgacatcgccgacggtgccccggtgctgggccgtgtgcactccgagtgcctcaccggtgacgccttgttcagccagcgctgtgactgcggctcgcaactggaagccgcgctgcgcgccatcgcccgagaaggtcgtggcgtgctgctgtacttgcgtcaggaaggccgtggcattggcttgatgaacaagatccgcgcctacgagctgcaagacggcggcgccgacaccgtggaagccaacgagcgcctgggctttgctgccgatcagcgtgattacggcatttgcctgccgatgctggagcatctgggcgtgaaatccctgcgcctgatgaccaacaacccgcgcaaggtcaaagccttgaccgagatgggcatcaccgtggccgagcgcgtgccgctgcacaccgggcacaacccgcacaacaaactttacctggcgaccaaagccagcaagctcgaccatatgatgggcaacgagcatcagggcgaggtcgaccgcgcgtgacccgtggccaggtcaaacggcgactgtccttcaactggtggcagtacctggccctggcgctgctcccgctgttcgtgctcaacctggtgttcggccaggctgaatctctgcttcccgtgttggccatgccgttgtttatcgccggcgtggcttcgatgtttttgagcctgcgctattttcacggctacaaacacgcgctgatcgccaccgccaaagccctcgacacgcccgaagaaccggctgcctggatcaccctggcggcgcgtcggcgcgcggcgctgctggtggccgcgttacccgcctggatcggcgcgctggcggtgttcgtcggtcttgaggccgtgcccctgtttttgctggcgctgtcgacaatggtgctgttttacctctatcgcattccgcgccaactcggatgaagcgccattggctggcggtcttgctgctggcgttgtgtgcccgggcttcggctgccgagcgcgtggtcagcctggcgccgtccctgtctgaaatcgtggttgaattgggcgctgccgacttgctggtgggcgtgctcgatgggggggatcggccgcaggcattggcgagcgtcccctcggtgggccattacggccagttggacatggaacgcctgctcagcctcaaacctgacctgatcctgctgtggcccggcagcgtcggcccggcccagcgcgagcaattgcagcgcttgaatatccccgtctacgtggccgaaccccatagccttgagcaactcaccttccaggtcgaggcgattgccgggcaattggggcgccagaaagctggccggcaattggccgcgcaattgcgccaacgcctggcgcaattgcgccagcgctatcaacgcgctgagccgttgcgggtgttttaccaagtgtggaaccagccgctgtacaccgtgggtggcgggcaaatcatcagcgatgcgctgacggtgtgcggggcgcgtaatgtcttcgatgatctcaagttgcccgcgccgcaggtcagcattgagtcggtgttacaacgcaacccggaggtaattctggccggggaccagccgcaactggacgcatggaaggcctggccccaggttgccgcggtgacgcaggggcgtttgctgcgggtgcccgacaaggggctggaacggcccagcgggcaaatgctggaagccgtggcgcggttatgtgaggtcatcgcaccgcagcgctagtacgagcgttcagcgttttcctacctgttatgaagacttgcctgctgggcggtgggcggggcagagggttttactccgcttcccacaatgctgccgtcgagcattcattcacagacaggaggtggccgtgcgccgtcagatcatcattttttcgagtgttgtattactggcaggttgcaacacgctggaaggtatttcaacggtgatgaatttcagcaatcaccccctcgccgccaaggctgccgagggcagcagggccacgaagcaggaccttctcgcgattcagcaacccaagcgcatcacgcccgtgcgcaacggcacttcacagtgctttgattatgagctggaaaacaacggcaagaaaaaggacctgtatgtgggtttcaccgacaaggacagggtcaatgcctatggctttatcacctgcgccgaggcaatcaaagggggttacctggattccaacgcgtctgtcgagcagaagtacccagccaaaacctaagcgctataacggcggcgtccacgtcacgcccagcatccaggtctggccctcttcgcggtagtcctggttgttggaaaagtcgggcgcgttgtagctgtagcgcgcgcgggcatactggcggtcgagcaggttgtcgaccttcagtgacacactgacttcccggctgatagcccagcgactgcgtaaccccagcaaagcatagccgccaaggcggttgcggttgtcttcagcgtcgtaactgctgctgatcgcctgccaacttgcaccgacctccactttgtcgaactgccgatcgaggtccaggctcaaagtgcgccgcgccctgcgggccaaggtgtggccgctgtcgcggtcgcgcgggtcgatgaatgaaacccccagattgccttgccagccgaacagttcctgcttgagcgccgcctcaaagccgttgatgcgtgccgaggccacgttttgtggcttgctggtgctgtcgaggatgatcgcgtcgcttaaatccgtgcggtaaagcgaagcctccaggcgtgtgctgtcactcagctggctgcgccattgcagctcgtagctcttggaggtctcgggtttcaggtcagggttgctgtaccgggtgtccgggtaataaaggtcgttgaaggtcggcgcgcgaaagccttcgctgtagctcagcaacagatcattgtcggggttgatcggcaaggtcagcgtgccgctccagctgttttggctgccgaactgttgattctggtcgcggcgcaggcccagttccgtggagaacccttcactgtgaaagcgatgctgtacaaaagcggcgcggttccagcggctgttttcggtgaatgtggtggagccgtggaagcggtcttcgtaccagtcgccgccgaggatcaggttgttctggtcgttcagcgtcaggtcgttttgccagttgaccgagtcgcggtaggtgttgaagacgctgaagtcatcgctgagtttgtcgcgcttggtgtcgcggttttcgctgtggcccagttccaggcgcgtctgccagcgctcattgagcctggcatcgacatagccgctggcactgctcacggtgtaatcggtgtagggagcttgcccaacactctggccggtggcgatgtcgtagcggccgaagctgttgtcgtactccgacttgccacggttatccagcaggttgaaacccacttccagctcatcgttgacggcgtggctaaggttcaggctgatggattgattgcgataagcgtcatggtcgccgtcgctggggaatgattcgtgcgttgagttgatgcctgcggtgtcatccaggctcgcgccgaggttaaagcgcgtgtgctcatcgccgccggaaaggccgaggctgcgttcccacgtctggcggctgccgaaccccagtttcaagcgcggctgcaggccttgttcggcgttgcgccgggtaaatatctggatcactccgccaatcgcgtcactgccgtaaatcaccgagcgtgagccgcgcagcacctctacgcgttcaatttgatcaacattgaggtattgcaggccgctgtcgccggaggtggtattggcaatgcgctggccgtccaccagcaccaggctttgcgcggacttggtgcctcgaatgtagatacccggcaaactgccacgcccgccggtgggcgccacttgtacgccaggtacgcggctgagcaggtcggtgacgctggtgggctgcaggcggtcgatgtcatcgcgggtgaacacggtgttggcggcgctgctgtcgttacgcgcctggacctggcggttggcgctgatgaccacgtcgggcagcttcagggcgtcatcgcgctcgaaggtgtcggccagcaggtcggtggcggggagtaacagcaacggcagggcgaggcgcaggcgggtcatgggctgtccatagcattcagcagcgatacaaaacacctgtgggagctggcttgcctgcgatagcggtttaccaggcacatcgatgttgaatgtgccaccctcatcgcaggcaagccagctcccacattttgatccggttcttaccggtaagtcgggttacaggcccagcagcgccatgcgctcgtgcaccgaagcctcgataccggcttcatccagcccgcactcagccagcatctgcgccggcttggcgtgttcgacgtacgcatcgggcaagcccaggtgcagcaccgacttgaggatgttctcccgcgccaggaactcgctgactgccgcgccggcgccgcccatgatggcgttttcttcgacggtcaccagcaacgcgtggctgccggcgatttcgcgtaccagcgcttcgtccagcggtttgacgaaacgcatgtcgaccacggtggcgtcgatcttctcggccactttcagggcttcggccagttgcacaccgaaaaccaggaacgcggtcttgctgccttggcgacgcacaatgcctttgccgatctcgataggctccaggtccttctcgatcaccgcattcgggccattgccacgcggatagcgcacggcggccgggccgttgtagaggtggccggtgctgagcatcttgcgcagttcgttttcgtcgcttggcgtcatcaccagcatgccggggatgcaacgcaggtaggacaggtcgaagctgccggcgtgggtcgggccgtcttcgcccaccaggccagcgcggtcgatggcaaacaggacgtcgaggttctgcaccgccacatcgtgcacaagctggtcataaccgcgttgcaggaatgtcgagtaaatcgccaccactggcttggcgccttcgcaggccatgcccgcggcgaaggtcaccgcgtgctgttcggcaattgccacgtcgaagtaacgcagcgggaaacgctcgctgaacgccaccaggtcggagccttccttcatcgccggggtaatgcccaccaggcgcgggtcggcggcagccatgtcgcacagccattcgccgaacacaccggaatacttcggcccgccggcttttttcggcgcagcagcaggggcgtccacgggttcaagcttggtgatggcgtggtaaccgatcggatcgacttccgccggcgcgaagcctttaccttttttggtgacgatatgcaggaattgcgggcccttgaggtcacgcatgttgcgcagcgtggcgatcagggtcggcaggtcgtggccgtcgatggggccgatgtagttccagcccagctcttcgaacagcgtgccgggcaccagcatgcctttggcatattcttcggtacgccgggcaatttcccacgcgccgggcagacgcgagagcaccttcttgctgccttcgcgcatgctggcatacgtgcggctggagaggattttggccaggtagttggacaacccgcccacgttgcgcgaaatcgacatgtcgttgtcgttgaggatcaccaacatgttggcgtccacttcgggcgcatggttcagcgcttcgaaggccatgccggcggtcagcgcgccatcaccaatcaccgcgatcgccttgcgatcactgccttgcaggcgggcggcaatcgccatgcccagcgctgcactgatggaggtgctggagtggccgacgccaaaggtgtcgtactcgctctcggagcgacgcgggaaggcggccaggccgtccttctggcgcagggtgcccatgcgctcgcggcggcccgtgaggattttatgcggatacgcctgatggcccacgtcccacaccagccggtcgtccggggtgtcgaacacgtaatgcagggcgatggtcagctcgatgacgcccaggccggcaccgaaatgcccaccggtctggccgaccgtgtagagcaattccaggcgcaactcatcggccagggtttccagctcggcttcacccagtcgacgcaggccgtccggcgtggcagcacggtcgagcaggggcgtggacgggcgtttgcggggaatctcttgaaacgtcgtgggcatcaggcgaatcgttataggtatagaagaggcggcagtttacctcaagcatcgcaaactgcccacgcagagcgccgaacttggccgatatgcggcggtaatagccgctgtgatcagtgacggcgttcgacgatataccgcgccaggtcacgcagcggctcggccgccgcgtcgaaaggtcgcagggcctccagggcctggtcgcgcagttccagggcataggccttggcggcgtccagcccgagcagcgcaggataggtcggtttgtcccgtgcgatgtcggcaccctgacgtttgcccagggtcgcggtatcactttcgacgtcgaggatgtcgtcctgcacctggaacgccaggccgatggcccgggaataggtctgcaaggcagccaactgcgcagcgtctgcgcggccactggccaaagcccccagttccacggcggcttcaatcaacgcgccggtcttgtggcggtgcatatgttcgagggcttgctggtccagcttgaggctgaccgagcccatgtcgatcgcttgcccgccgaccatgccggccgggcctgccgcgtgagccagcttagtgaccatgcgcaggcggatctcggcgctgacgctgctcaggcgcgggtccagcaaggcgctgaacgccaggctttgcaggccgtcaccggccagaatcgcataggcttcatcaaaggctttgtgggtggtgggctggccgcgacgcagatcgtcgtcgtccatggccggcaaatcgtcatgcaccagggagtaggcgtgaatcaactccacggcacacgctgcgccgttggcttcttcggctggcgcgccaagggcttcacacgcggcataggccagcagcgggcgcacgcgcttgccaccattcatcacgctatagcgcatggcctcatagaggcggttcatttccgggctgggcgcaacaaacaaggggtccagcgccgcattcacccgggcttggctactggcctgatacgcgtcgatcattcgggctgttccgcatcgaaaggttcttcggccaactccccgtcacgttccagcagcacttgcaccttctgctctgcctgcgccagcgcgctctggcagtcgcgagtcaggccgatgccttgctcaaacgctgtcaaagagtcttccagcgacaactcgccgttctccagacgctcgaccagggtttgcaggtcggcgagggattgttcgaaatcgagtgcaacttttttgcgggccatggcggctaatccggtagacggtaaaccggcgcgacactagcagacatggggattctgggcaaatgagcgggtcagttggcagaggtgagtcaatcgctcaagtcattgatttgatagcgcgtactgcgtcctccgccgggtaaccgcaccaagcagtttttttccagcagatcagccaggtgacgggttgctgtggccttggacaccttcgcgacggcttggtactgcgctgcgctgatgccgtgttcaaagcctttatcaccgccgtcgagcaggcggttgagtaccttgatttgctcggcagacaaaacgaggtggcggtgctgctgccagaaacgggttttgtccaggacgcggtcaattcgcttcatggcttgcagcaagctgagcaacagcgttttgaggaaccattccagccagtcagtgatatccagcgcggccttctggttggactcgagtgccttgtagtaaccggctcggtcctccaggatgctggccgacatggcataaaaacggatagcctggtgctcgccctgggccagcgccaaatccgtgattgcgcgtgtcaggcgaccattaccgtcatcgaagggatgcagcgtgacaaaccagaaatgcgccacgccggcgcggaccagcgggtccagctccggttgatcgcgactggtttcgaaccattcgagaaaatcatccagtgcttgttccagatcctcacgcggtggcgcctcaaaatgcacggtcggccgatcaagccgccccgacaccacctgcattggctcctcgccgcgcaatgccccgacattcagtactcgcgctgcgtaacctgcctctggcgctggaaacaaaagatgatgccagttgaaaagacgcgcgagggtgaagggttgggcgtattgctgggtggcatccatcatcaattcagccaaaccttcgctacggcggctgacgctgatatttttcaagggctccaaacccaaacgccgcgccagtgatgaacggactgaacccacattcaattgctccccctcgattgccgaagaggtcaggatattttgcaataatgcatccagttcgttctgcgcgttggccgcttggctcacggtaccaagcatgcccagcagtttcccttgagcgtgcctgcactcacgcaacagggccgcaaggcgcaccggttgccagtggaagtgcggccagtcggcgtgttgccagatccagaacggatgatccatgacgcggtacctgtagcgtgagccgaatagaaaggttattcggctcatgttgtgagccgattgtgcattttattcggctcatcgtccactcaaccacccatgctcgataaacggtggggggctttgtcaacattccatcaggactcgttgccgtgtgccgtcgccgcccgcagatagttgtaaacactggcacgggagatcttgaagtagtcgccaacatagtcgacaaaattgcgtacatccaacaaaccatgttcccgcgcctgtaccagcacctggatgatttctgcgcggccaaaatcgctcggcttcaggtgattggagcctgcgacggcttcaacgatctcattgagcttttctcgccagtcgccgctgaacagcgactcggggcgcgcctgggattgctggccaacggcgaaaccactgatgagcttctgcacctgggccagcgcggtgacgtcgaagttcaggcacagcagcgttttcggctcaccgtcttcagcccgcgccaccatggtgatcgagcgcagcttgcggctgttggggccggttttttcataaggccccaccacgtccggcccggcggccaattccggcagatcagtgatcagcgattcatcaccaacctggcgcctggagaagccattggcgatatgggcaatgcgcccgctgcgcaggtcgtgcaccaccgcttccaggtctggatagagcagggcggcgatgccgtcggcggttgccttgatgaatgcgatatcgaccatggggtaaccgggtgccggaaataggaaaggcgattgtacgcaagcgcccaaacacttgtcagttggcggcctgcatccgttccactgcgagggtcgccaaggcgacatcctgggcggcaaggccggtcaggtcggcgatggtcaggtcttcatcgctgaagcgcccgcaggctttgccggccaacacatcgccgagcgaaacgtcggcgtggccggtaatcaaacccgctttcactgcatggctcatttcgccatggtccacgcattgggcgcggtcgtcggtcatcactactcgggcccgttgcagcaacacagggtccagttcctgtttgcccgggctatcggcaccgagggcgacgatatgcgtgcccgcgcgaaccacggctgaaggtacaagtgcttcggatgagggcgtgcaggtaatcaccaggttgcactgtgcgaaaacttcttcgacgctgtcggctgtttgggctttcaatccatggtgcgccagacttttggccaagcgttgcgccctttgcgtactgcgcccccagatcaccacgcgctcgattccgagcaactcgcaggcccagcgcgcctgcagttcagcctggtgcccgctgccgataatccccaacgcgctcacctgcgaaggcgccccggcccgggcagccagagcgccggctgcggcggtgcgccaactggtcagccagccttcgtcattgagtacggccagggtcttgccggtgtgggagtcgaacaccagcaccagtccgttattggtcgtaaggccccgggacgggttctcgtaaaagcccatggccagcttgaccacaaacatcgaaccgtccttcgcgtaaccggccttgatatgacaatcccccggcggcttctcaaacagcaacacgcccggcggcggcgcgacgatgcgcccgtcagcgtggctgatcagcgcttgttcaacggcctgcaacatgtctttacgcagcaaggcggtgcgcaactcgctgagcccgtaaaccgccagtggtaccgggctcatcaagtgcgctcccgcaggtaattggcgaacacgccgaggccctcttccatctgcgcgcggccgtaaccgatgcgaaaacggtcttgcggcaccggcccgagttccgagtgataaatactcgagggcagcaacaacacgcccgtgcgttcaaccagctcattgcagaacacctcgaccccttcagcgcccaggtagcgcgggtaggcaatgcagccgccatccgggtgagcccactcaaactgctcggcaaactcggtaaagaagccgtccagcaagcccaggttgtggcgcatcaattgatgaatgcgcgcgaggattgtgtcccgcgccttcagcgcaatgattgacagcacctcgctcggccccgaattgcagatcgacaggtaatgtttcatacgctccatgcgcagcagcagctcacgatcctgacaagcgatccagccaattcgcaggccgggcaggccatagggcttggacatcacggccagcgacaccccgcgctcatacacatccgccaccgccggcagctgttcaccaagccccagcaggcgatacgcctcgtcgctgaacaggtaaatcccgtgcaggcgacacaaggctatcaactggtcgaaacgctcgcgctccaggatcttgccggtggggttgtgagggaagttgatggaaatcagcttggtgttgggccgaatcgcggcggccactgcatcgatgtccagcgtccagttttgcgccgggtccagcgccacgccggacacctcgcaaatgctcaaggggatggtttccgccgactggtaattgggcgtcaccacaatcgcatggtcgccggcatcgagcagcgcgtgcatcgccacgtacaagccttcctcggcaccggcaaaacacagcaagtccttgggcttgagctgttcgtaagtcgatgcgatcacttccagcaatgccggcaggccccaggtttgcgtgtagccgagcggcagattctcgaacgcctcccggtcatccgcgcttgccatcgccagcaattccttgagggtgaggctctgggcgtcggaagccgtcatgtgataacgcgcagaaaactcccacttggaaaagtaggtttcgagcttgaaatcgggaagggtggccatggcgcgtttcctgaagatgagcgaggtcagaaaggcgacattagctggatgtatataatttgtctaatatgtatttttagtctaattgaggggtttagagaaatttaaagtgccagcaggactattctgtaagtcgtgcgaggtcattcctggagtgctcatagctccttgtgaccgcaaaggtccctgactagcctgccttgcgtctcaatgatcgggtcagtccgttttgtcgcgaagcccgcgcctgaaacccaagagtgaaactggaatgagcgaaacctctatcggcttgattgcgcctcctgcgggttacagcgattggctaagtgaactcaaactgcgcatccacacagcccagcagcgtgcgacgctggcggtgaaccgtgaactggtgctgctctactggcaaatgggcaacgatattctgacccgccaggcagagcagggctggggaagcaaagtgattgatcgccttgctcaggatttgcgtgcagcgttccccaaaatgaaaggtttctcgccacgtaaccttaaatacatgaggtctttcgccgaagcgtggccggacgcagaatttgtgcaaggggtgcttgcacaattgccgtggtaccaccagatagctctcctggacaaactccctggcccggaagcccggcgttggtacattactcaggcgattaaacacaattggtcgcgcaacacgctcgtcatgcaaatcgaaggtcgcctgctggagcgcagtggcaaggccgtcagcaactttgagagccacctgcccaaacccatgtccgatctggcccgtgagtcgctgaaagacccctatcgctttgactttctcagcctcgccctggatgcgcaggagcgcaacatagaaaacgcgttgatcaagcacgtcactgactttctgttggagttgggagccggtttcgctttcgtcggccagcaggtgctacttgatgtggggggagacgagttcttcgtcgacctgctgttctatcacttgaagctgcgctgctatgtcgtgatcgaactcaaggccggaaaattcaagccggagcacttgggcaagttgggtttttatcttgctgcggtggatgcccggctcaagcatcggcaggatgggccaaccattggcctgttgctgtgcaagagcaaaaatgaagtggtcgctgaatacgcattgcgcgataacaaccgacctatcggcgttgcggaatataagttggtggaatctttgcctgcggaactgcaaacgagtttgccaagcattgaacagatagagcgggagttggcgggttagctaaggttaaagctgcccctgtggcgagggagcttgctcccgctgggccgcgaagcggccccaaagaggggactgctgcgcagtccggcgggagcaagctccctcgccacaggtacggtattcacccgcaactcacggtgtgtggatcaagccgttttcttgctccccgaatccatatccgtactgccccaaggccgccagtcgtcggtatgccgctcgctgccatgagggccgctggagctggtgccgcccgccaggaatttctcccacaggttcttgctgtcggggtcgccgtccttgtgcaggtgaggcgccaggcgagccagcgagctgcctttcttgtcttcggtttccttgaagtgtttccactcgtccgactggtattcaaacatcgacttatcgtccggcgtgtcccggccgccgtacatgtaactggcgtaacgagcgtattcgagcttgtcgccccagtcgtccttggtcacgccagcggcggcgaggtctttgaagaactggccttgtgagtctgtgagtttctgcattttggcgtgttcgaccgcttcggcaatcagggtgcctgcaatcccgaaaatcacaccggccacggcgaaaaccggcccggcaatacgggcgcccatggcgaggccgcgtacgacggtggcggccacatcaccggccagtttgccggccaggtgagcgcctttgggggcgaacatcgagatggtattggcaatggccataccggtaccggatgcaccgccgcccagcgtgaaggcggcgtcggttttctccagtgcggtcttggcattcttcagtttgcgggcaccggaaacgatgtccatcacgccaccggtcaaatccaggccggcgccgcccatgaagcgcaggaacgagcgaccggaggcgatcgcaatttcggatttggacgccgggctacctttgccggggatgttcttggcgcccatctgttcgccaagggatttggcggcgttgtcgtattccttgacctcatcggccgacaggttgcccacgtcgagtttcttgagggtttcggaggattccttgacttgggtactgatggaggcggccagtgcgtcggatttttcagcggttttcttgccccagatgtccggcaggttctcgtcgatcagaccgagccattcagtggctttgattttcggcgggcctttaccgtcggtgtccacggcagggtcgtaggttttgctgccccccagggtttccacgatgttcgaaccgaacttcaggaagtcgttggtaaagctcaagccggagaccagatctttcgcggcggcgattttctggtcgtcggtcatgttggcgccgccattggcgagctgcagggcgccgctgaccaggttcatggtgcctgccatggcactcagcccgccggtggagctggcggtgtgcagcatcgtcttcagggaaccggcggccgcttcgcgattggcgcccaggcctttgagttgagtatcgacaatcttgtcgatggccttcgcgtccccgctggcggctgcgaggcgaatggccgctgcaatctgtttgttttccccgggggtcagccctttgatatggccgtcaaggatgtcgatttcatccttcatctttttgtacatgtcgtacgttttgtcgcccttgtccagggcgccgagggtggcgttgatgccgcccttgaccatggtgaacgtggccttcagcccgctttcggcgttttccggcgataccttgtcggggttttccatgtaggtgttgagctggtgcgtcatcatgttctggtcgaacgtctggcggcgcgcggtgtagctgtccggttcaaggatgcgcagcgattcgaagtagcggtctacgtccagctcggccatttcggcttttttagggtcgcccgagtcattcatggcgatcacatagtcttcgaagttcaagttggcgtcgcgggtgccgtctttgaacagtgtcgggaaaacttgttcgcgtacttcgttcaatcgatcctcggacaaactaccgacacttttctttagttcggcgtcgtagcggtccttaatgccttctttgcccatcaaggtggaaatttctttggcgagtttttcttcgtcaaccatctccttgacgtctttgccgttcagcttggtcgggctcttatcggtttcgcggtaagtgccgctgcccaggttaatgctctcggcgtaaccgtaaagatcgtagccattgtccagcgcggcctgggcgtccatcaacttgacgatcttcgcttcatccgagtcttcggccagcttgccgctcttgatgtcgtcgcggatgccctgcacaaagttctcggcggtctggccgcccacggtcttgtcgttgggcaattccatgtccatcaaaccttcggcgccgaaggtggggatgttgtatttgtcgcgcagggcctgcacgtcttgcggctcatcgggtggcgcggccttgtcggtgtgcgtcgcgtctttgacgtgcatcaggtcacccttgaggctcgagtacccgtacttgccgaaatcctgcaagcggccggcctcggtgccgtggcgggcttccttgtctttggtgaaaccatcgatgctgtcgttgtctttgttgcgggcgtcgtaaccggtgagcagcttgccgttctcgtcgaggctgaccacatgctccaggacctgggtggcgcggtacgcggcgtcggcgtcgttctcgaaatcaccgacctgttttttcaggttgtccttcacgtcgctctggttgccgaggtttttcaatagcggcgtggcgtcgataatttccttggccgagcgcgtgtcaccgtcggggcgtttctgtttgtcgcccaggtccgacttcaccacttcgccgcgcaggcttgagtaaccgtatttgccaaagtcctgcaagcgcccggcctcggtgccgtgccgagcctcgccgtccttggtgaacccgtcgatgctgttgttgccgacatttttgccgtcggtcagtttgccgtcttcgtcgatatactcgacatgctccagcaccttggaggcgcgataggcggcgtctgcgtctttttcaaaatcgccgacttgttttttaaggttgtctttcacgccgctctggttgcccagctggctgagtagcggtgtgtccttgatgatttgttctgccgaacgggtatcaccttcgggacgtttctggcccttgcccaactcatccgtcggtttgggtttgggtttgggcgccgtggcggcgtttttgacggacttttcccaggccgcgaccttggttttatcagtgccctcggcgtcctttggggtgggttctaccttcgcgaccatggtctatctcctgagttgattgttgcgccgaaagcgccaccgttaatggtgtaaaagtgttaatccttttaaagcgaacagggctctacaacttcccgggcaagtgcccgaaacttattagtcagtaacaaggacatgccgctagttggtcggcggctgtgggtaagtgcggtgaatcagagtgatttggaacttagcacggggaattgtggaattcgcaaagtcttcacaacaattcacaacgccgatagcctgtttagaaccttgaccgtgtaataccggcacacgcaaaaaagcctgcggttgagcgcaggcttgttctagagcggggtgtagcttagtgctggcgtgcggtgagtgccgaataaccgttcatcaggttgcggtagttcggaatccgttgggacaacaggttgcccaagccttcgatgtcgttgcgccagtcgcgatgcaactcacacgccaccgaaaaccagttcatcagttgcgcaccggcctgcgtcatccggctccaggccgcttgctgcaccgtagtgttgaaagtgcccgaagcgtccgtcaccacaaacacctcaaacccttccgccagcgccgacagcgtggggaacgctacgcagacatccgtgaccacaccggcaatgatgatctgtttgcgcccggtggctttgatcgccttgacgaagtcttcgttgtcccacgcgttgatctggccagggcgagcgatgtacggcgcgtccgggaacatttccttcaactccggcaccagcggaccgttggggccttgctcgaagctggtggtgaggatggttggcaggttgaagaacttggccaggtcggccagggccagcacgttgttcttgaactcattgggcgagaagtcctgcaccagggaaatcaagccggtctggtggtcgaccagcaatacgatggcgtcgtctttgttcaagcggttgtaggttggggtgctcatggttgaaatccttttttgtttgggtgggttgggcgttgcgttcaacatgggcacagattaatgggtggcttgcgggggataaatcggctgtgatgcgtaattctgtcaactgaaaagagacaatgataaaaaagtgatgcgaaaaatctcacgcgtgagctattgagcgcatcgaaaattgcctgtagattttctcacgcgtgagtttttcacaacgaggccagtacatgaaaagcagctctccatcgagcccgtctgaagggcccgattccgattcagcaagccttcagggagagcgctcgaaaccgtccgcgaaaaagccgtcgagcttttatatgaagcagatgcgcgcgggcctggcggccgccgggtatgtgaaacacgaaacttgggtgcttcccgaaaaccgaagcttgctcaagcagatggagaaacagcttcgccagccgattctggctggctcattcatgtcggagaatttcatgagcgcaggtaacaactggaatatcgaccgcctcttcacggcgcttcaggccctggacgacgtggtttccaacgacatcacgctttctctggttcaaggctccgagtccagcatcaagctggaaatgaacgacttcggtggcttgccgatttacatcgcggtggtgggcgaacagatcatcgtcgacaccgtgctggtcgacgtcgagtcgatcaacgacgtgtcgaaattcaatgacgccgtgctgcgcagccgggaaatgttcccgctgtcttcgatcggcatcgagtcgatgcccaacggccaggttgtctacaacatgttcggtgcattgagctccgactccagcctgaccaacatcgtgaccgaggtgaaaaccctggtcgacaatgtgcagcgcgccagcgaagccttcgaacgtttcttcaattaagtattcgggagtatccaatgactcagtccatctggagcaagctgttcaccgcgctgcgtggcggtgccagcgaagtcggcgaatcgatcgtcgaccagcaagccctacgcatccttgaccaggaaattcgcgatgccgacaccgcgctggccaatgccaagcgtgagttggtcagcatcatggccaagcacaaactggcgaatgatcgcgtcggtgaatacgacgccaagatcaaggacctggaaaccaaggcgatggccgccatccaggccaaccgcgaagacctggctctggaagtggccgaagccatttcgaccctgaccaccgaacgcgacgccgagcaaaagcagactgccgaatttggtggttacgccgaaagcatgcgtaaagacatcaccaaggccgaaagccggatcaaaagcctgcgccagcaagtggacatggccaaggcgcgtgaaagcgtgcaaaaggcccaggtcagcgcgtccatcgctagtggcggtgccaatggcaaactggaaaccgcagtcggtacgctgaaccgcctgcaggccaagcagcagcaacgcgccgccgaactgcaagcccaggacgagctggccgaggcttccacgggcactgatcttgagcgcaagctgcgcgaggcgggcatcacgccgaatgaaggcagcgccaatgcgattctggagcgtctgaagcaaaagtcggctgagtaaataaagccgcaacaggaggggcctattctcggccctttcttttttatatcgaggtcaggatggacgccctcaagggtttcaagacaatcgcaggcttggccctgttgatggttgcgctgcaactgttcaatgtggcgagcggttacagcctcatggctttcggcctgatcccgagaacagtgcgggggttgttcggcatcctcacctcaccgtttttgcacgggtcttttacgcacctgagtgcaaacctgatcgcctttgtggtgctgggtacgctggtgattattgaaggattcaaccggtttatcagcgtcagtacgatcatcatcctgctgggcggcgcgttggtgtggctgttcggtttcagtggcgtgcacatcggggccagtggctgggtattcgggctgtgggcctatctgttgtcgcgtgcctggtttcaccgaagctggggcaacttgatcatcgccgctgtggtcgcgctactctatggcggcttggtcctgggcttcctgccgcgtcaaggtgtttccttcgagggccacctgtttggtgcgttcgccgggtttattgcagccaaggtccttctttccacccgcctcaaggaacgctccaatgggatggtttaaacagttgatggggctcgaggccccgcacgcaaatgccgaatcaaaaccggcgctgccgaccaccggcccgctgggtttggcgccaggcaaaggcgtgaccttcgacgcgaccctgaaattgttgctcgatgagaaaacctcggtggtcatccccggcacccaggaaatctggagcaatggcaccgttgacctcgggcaatccacctggctgtcgcgctactacatgaacgacgaggattactggctgcaggtgcacaccaccggcgacatcgccggccaggtcgagtcggtgattctgttcaactacctcagctacgtcactatcagcagcgaagcggagctgcgcaggctcgcgggcccgcagagcctgatcgggctgccgacctacacccacaacggcgtcgaataccagcgcgtgtggggcagcgaaaacggccagaccgaattggtggcgatgaccgagcaagtggtcaaccctgaagagtcctacaacgtcgaacatcgttcgatgctatatgctcgcgacaccggcctgacggaccgtcgggaatttctgctgttttccgtcgaagaagacgccgaaggcaccatcagcctgagcacttcgctgggcatttccctgtactccaccgatttgaacgcgctctaaaaaggacgaagtcaatgctagaagcactctccatttccctgaacaaagcggctgtgctcgggtttgtcatctacatcctcggggccgctgtgttgctcgtgctgttccagttcatctatacccgcatcaccccgcacaaagagtttgagctgatccgctcgggcaacgtgtcggcagcggtggcgctgggcggcgccatcatcggcttcgcgattccggccagcaacgtgattgcctattcgatcagtattctcgacttcgtcgtctgggccgtgatcgcggccgtggtgcaactgctggcgttcctgctgaccaccctggtgctcaaaggcacctccgagcgcatcagcaaaggcgaactcgctgccggtatctacgtggccgccgtggccatcagcgttggcatgctcaacgccgcctgcatgacgcctacccagaactgacagcgcacggagcctttgatgaaacgaagcaagtacgtccagctgtcgctggccgcgtcggtcgccatggcgatttccggctgcggcccgacggaaaaaacctacgatgtgcagaagaagtacaacttccagtccgtgcagcaatgcgccgatgaaaagctcccggtggacgtgtgctctgacgcctacatgacggccatggccgaacaccgccgcatcgccccggtgtacgacagccaggccgactgcgacgcagattttgtcgccgactggtgccagcaagactccaccggcaaattcatcccacggctgggcggtttcgaactgaccgccgaaggccgcgtgacccaatcccaggtcgacgcagccaacgctcaagtggccggcgcgcaagccaacggtggcggctcgggcttctccaccagcagcctgttgaccggcctgttgatcggcaacatgctgagcaacaaccgtaacagctaccgctccgagccggtgtaccgctaccgcgatgatcgcggcaattacggttcgtcaacgctcaaccagcgcgtctccaatggcgccacctttggccgctcgaaccaggcccgctacggcagcagcaactactcgaacacgctgcgctcttccagcaaatccagcgctgtttcttcggccacctcccgtggcggcttcggcagcaaggccagcgcacgcagtggctggggcggtggcgggtcgagcagctaaggaaagcgagccatgaagaaaatccactgcgcagaacgtcacgactggaaacagaccgccgacagcctcggctttctgttccacaccatcgacgacgaaccctactgggacgaaagcgcgtactaccagttcacgctccagcaaatcgagcgcgatctcgaagacccgaccaccgagattcatgacatgtgcatggacctcgtcgcccgcgtggtcgacaacgaagagctgctggaacgcctgagcatccccgcgccgttctacgacatgatccgcacctcatggctcgaaggccacccgcacctgtacggacgcatggacttctcctacaacggcaccggccccgccaaactgctcgaactcaactacgacacccccaccagcctctacgaagccgccgcgttccaatggggctggctggaacaatgcatcgagcgcggcctgctgcccaaacacgccgaccagttcaacagcatcgacaccaaactgcaccaggccttcgcccagctgcaggtcaaccagccgttctacttcgcctcgatgaaagactcgatcgaagacaaaggcaccaccgactacctgcgcctcgtcgcggaaaaagtcggcatcgaatcccgccacatcgacatcgaagacatcggcctcaccgccgaaggccgcttcgtcgaccttgaagatcgctggattccccacctgttcaaactgcacgcctgggagttcatctttcacgaaccctttggtgccgcgattgccgagagcgatacgcagttttttgagcccgcgtggaaatccatcctctccaacaaaggcatcctgccgctgttgtgggaattcaacaaaggccacccgaatctcctggcgtcacacctcgatactgaccccggcaaggccgtgccgaagggttgggtgcgtaaaccgttcttctcgcgggaaggggcgaacattgaactgcaagcggctgacgggctgatcgtgaaagaggacgggccctacacggatgcgccgtttattcttcaggaatttgcgccgctgccgaagtttggcgacagctatacgctgattggctcatgggtgattggcgaccaggccgcggggattggcgtgcgcgaagacaacagtttgatcaccaaggattcgagccggtttttgccgcatttgatattggattgaaagcatccatcgacaagctttcttcgggcattaaaaagccggcttgtggccggcttctcggggactgcttcagcttgtttttgacaaacctcaccagccttcaaatcgctcagcccacatcatgtcgggctgaatagtaggggcatccgcgggaactcctccgcttcgccagacaggatggatagccttgagccatctccctgccaaatgtgggccgcatgatacccgcattcacctcagttgcccacctccggatccggtttagagccttcccagcccaataaatgctcatccagcggcacgggtggacgacggttgttgagggtggaccaccagaacacccagccgacgatttgcaggttttcttcgaagcgttgttcgtgggtgaggtattcgtcgggatgttcgccggtgttgtggctgcgcatgcgcaggccgccgccggggcggttgtagaggtatttgatgcgcagcatgccgccgtgttcgacggcgtagatttcgccgtcgatgatttgggtgcggccggtgtcgatgccgagggtggcgccttgctggatgatgtcggtcatgctgttgtcgaccatgtaggcgcctaccgcgcggtcggggttgatgttgagggtttgcagggtgtgttggctgacacggatgcgctccacggaagtgaacgcagggtggaggggtatttccacgtcggtgctttccgggcggttgattgggcctgtgaggtatttgcccgcgtcttcgcggatggggatcacgttccttgtgtcgtggccttcaagcaggaattgggccggtgggtgtttggggccttcgccggtgcgcagccagcggctggagatgcacagcagttctgcgatctcgttgagccggcccatgggcacgccgcgtttgaaccagttgttcacgtgttggggcgtgacgccacggttcttggcgaagtcggaggcggaaagatgaacttcccgaagtagtgcttttagtcgatcacctgatgtattcataaacgcagagtttactggccggaaaaccacatcaaataaaccatgcgttgaattgcgcctgtaggagtttgcttagttgtcgcttgatttgtcggacttgaaagttagttgaacggtgagtgttaagtattgaacttgttgtttagtttttctcacaaaaaaagccccgaataatcggggctttttcaattgccggggcaatgagtagcggtatcagcctttgtaggcagctaccgacttcatgatctcggcgcgggcggcgtctgcgttgccccaaccgtcgatcttcacccatttgcctttttcgaggtctttgtagttctcgaagaagtgtttgatctgctccagcaacagcggcggcaggtcggtgtattccttcacgtccacgtacagctgggacagcttgtcgtgaggtaccgcgatcactttggcatcgccgccgccatcgtcggtcatgttcaggatgccgaccgggcgtgcgcggatcaccgagcctggggtaaccgggtaaggggttaccaccagcacgtcgagggggtcaccgtcgtcggccagggtgttcgggatgaaaccgtagttggccgggtagaacatcggggtggccatgaaacggtcaacgaacaggcaatcgctgtctttgtcgatttcgtacttgatcggcgcgtggttggccggaatctcgatggcgacgtagatgtcgttcggcaggtctttgccagccggaatcttgctgtagctcattgggcgttgcccccgtagttggccatgaaacatggccggattgacctaaaagtggcggcgattataggcatattctgacgccgatgccatgcgtcagacgtcgtacggcgcgtggcgttcagtctgataccgcacgtcgcttgcctgcagtcgggtaaggcgggccagggggtcctgccgataaaactggctcagttgcgcgtacacctgtggataagtgctgaccagcaaatccggggcactgaagaaatactcactggtgacggcgaagaactcggccgggttttcagccgcgtaggggtcgatttcagtgtcggcatccgggttggcgtcgagctggcggttgaggtcgtcaaacgcgctctgcatcacgcgggcccagtcttgcacgcgcatgtcgctgtgcagcggcggcaggccgttggcgtcgccgttgagcatgtcgagcttgtgcgccagttcgtggatcaccaggttgtagccttcccagttgccactggccagtacgccgggccaggcgaggatcactgggccttgttgccaggcttcgccgctgtgctcgccgtcccattcgtgctccacgccgctggcgtcgcgatggcgctgggggctgaggaagtcgtcggggtacagcacgatttcgtggaaaccctggtaccagtcgaggtccccaaggttcatcagcggcagttgtgcctgggcggcgagcagcaggcgttgttcctgatgcaggtcgacgccgggcagggcggtgaggtgcttttcgtccaggaacactacgcaggcttcgcgcagccattggtcctgctcggcgctgatgccgtcgagaaaggtcaggtgcttgcgcacccgctgccaggtgtcatcggcaatcgggtgcctggccagcaggcgccggcgacgccaggcgctgagggaccacacggacggtgcttacgacttggcttcggaggacgtgcggccgaagcggctgcggaccacgccaatgatcatcggcaccagcgacaacaggatgatgaacaccaccagcagcgacaggtttttcttgatgaatggcacattgccgaagaagtagcccagggtcacgaggccacccacccacaggatggtgccgaacacgctgaacccgaagaaacgcgggtaaggcattttggcgataccggcgacaaacggtgcaaaggtgcgcaggatcggcaggaagcgcgcgagggtcacggttttgccgccgtgcttgtcgtagaagtcatgggttttttgcaagtagtcgcggcggaagatcttcgagttcgggttgctgaacaagcgttccccggctgttcgcccgatcacgtagttggtgctgtcgccgagaattgccgccagcatcagcaggccgcccagcaataccgggtccatgccgccgccggcggcaatggcgcccgcgatgaacaacagggagtcacccggcaggaagggcatgaccaccagcccggtttcgcaaaaaatgaccaggaacagaatggcgtaaatccacactccgtagtttctcaccagcatgtcgaggtacacgtcgagatgcaggataaggtcgagcgggttgaaatccatgtagggcacctgtgtgaatggcccagctcagcaggcctgtgcgggggcgtcgggtaataaggctacaagtgtatgccgaatttcttacaagactgaaaggtccgcattatacggattgagtcgtgaaaagcgtgttggttttgtagcgggggatgtcgcaggcaggttgaaacagcggcgattaaatgtgggagctggcttgcctgcgatagcggtttgtcagccaatgcaacacttcctgacacaccgctatcgcaggcaagccagctcccacaggaggttcggggtgtttggaggtcagtcttcgctgatcggcaatacgtagttcttgaactccgtgtcctcacggaacccgatcgactcataggtcttctgcgccacttcattgtcactgctggtcgacactcgcagccgcaccgcgtgggtttccttggccattttcttcgcggtgcgcatcaggttatccgccaccagttgccggcgcgcatcttcggcgacatagatatcgttgaggatccacacgcgcttgagcgacaaggaagaaaagctcggatacagctggcaaaaacccagcaatttcttgtcatcgtcatccgccaaggccagataaatcaccgactccttacggcgcaggcgcttttccaggaagtcccgcgatgagtccgggaatggcagcgccccataaaactcgcggtatttgacgaacagcggggtcaacaggtccaggtgttccagggtcgcttgagtaatccgcatgccaggcctcaacttccaaaggggggatgaccacacaagcggccgtgactcgatgctgcctaacgtcgcgaaaaagcgcaatcgtgcagccgtcagtcatccggtgagctgagcaggaaattgcccttcatcaggtcaggatcatccgactcaatcgtctgaacctgcgcctcgtccttgagattgacccccgacagctgccggcgacacgcctccttcatcaagtaaagcaggcgatgcgctgccatgccgtagctcaagccttccaggcgcacgttggagatgcagttgcggtaggcgtcggtgaggccgaccttggggttgtaggtgaaatacaggcccaggctgtccggcgaactaagccctggccgttcgccgatcaggatcaccaccattttggcgttcagcagttggccaacttcatccgccactgccacgcggccctgttccaccaaaatcactggtgacaaagaccacccttcagcgtgggtctgttcttccatacgtgtcagaaatggcagcgtatgtttatgcacggccagtgccgataaaccatcggcgatcaccacggccaggtccacgccccccgggttggcggcggcgtaatcgcgcagcctctgagcggattcatcactcaaccgccgcccgaggtccgggcgttgcaaatacatatgacggtcgactgccgcgctgtgcagcaacaagctttcgcgcccgcgttcggccatctggctgctcaggccggcgtggtcgaagggcaggtgtacggcatcgcgggcctgggcgtgggcgaattgaaaatccagctgtgcgctggtggggatgctggtgccggtgcggcccagggcaatgcgcgccggggtaaggcggcgcagttccagccacgggttttcagacgtggtttcaagaggttcgacgtgcacgggcggctccttcatcccaattgcgccaaggcttggcgaaacgctggtggcaggctgttgccgaaatgcaccttgccgtcggcttgcgtgaagatgcccattttcgccagccactgttcaaactccggcgccggttttaaacccaatgtttgccgggcgtacaaggcgtcgtggaacgaggtggtctggtagttgagcatgatgtcgtcggagccggggatgcccatgatgaagttgatcccggccacgccgagcagggtcaacagggtgtccatgtcgtcctggtcggcttcggcgtggttggtgtagcagatgtcgcagcccatcggcacgccgagcagcttgccgcagaagtggtcttcaagccccgcgcggatgatctgtttgccgttgtacaggtactccgggccgataaaacctacaaccgtgttcaccagaaacggtttgaaatgccgcgctacggcgtaggcacgggtttcgcaggtttgctggtcgacgccaaagtgcgcgttggccgacagggcgctgccctggccggtttcgaaatacatcaggttgttgcccagcgtgcctcgattcaggctcaagcccgcctcgtaaccttcctgcagcacgctcaggctgatgccgaaactggcgttggccgcttcggtgccggcaattgactgaaacaccaggtccagcggcacgccacggttgatggcttcgatggaggtggtgacgtgggtcaacacgcaggcctgggtcgggatttcgtagcgctggatgattgcgtcgagcatttccagcatggcgcagatcgaggcgatgctgtcggtggccgggttgatgccgatcatggcgtcgccgttgccatacaacagcccgtcgagaatgctcgcggcaatgcccgcgggttcgtcggtagggtggttgggttgcaggcgtgtcgacaggcgcccgcgcaggcccatcgtgccgcgaaactgggtgactacacggatcttctgcgccaccaaaaccagatcctgtacacgcatgattttggatacggcggctgccatttccggtgtcagccccggcgccaatgcgcgtagggaatgttcgtcggccgcgtcactgagcagccagtcacgcaggccgccgacggtcaaatggctgactgcgccaaacgcctgtttatcgtgggtgtcgatgatcagccgggtgacttcgtcgcgttcgtagggaatcagcacttcttcgagaaagtgtttcagcgggatgttcgccagcgccatttgcgcggccacccgctcaccgtcgttctgcgcggccacgccggcgagaaagtccccggagcgcgcagggctggccttggccatcacgtccttgaggctgtcgaaacggtaggtctgtgcgcccaccgcgtgggaaaagcttgccatacagtgtctcctgggcgacgcaggccaaggcctgcgtcgaggttttcggcattcagtgcaaggcggcctctgcggcctggatcgccgcgaattcctcctccggcgtgcctgctaccaagtgatgccggctgtagaaagcaaagtaagcaattaatactccatagatgatcgcggcgccaataaccacgcgcgggtcgaccaaaaagcccgccaccacggccacacaggccagtaccagcgcgatgcccgatgtaaaaatgccccccggcgtgcgatacggacggtccattttggggcggcggatgcgcaaggtgatgtgcgcggccatcatcagcacgtaggaaatggtcgcgccaaacacggccaccagaatcaacaagtcgccctggccggtcagcgacaggccgaaaccgatgatgccggggatgaccagggccagcaccggcgccttgcttttgttggtttgtgacaatttacgtggcaggtagccggcgcgggacaaggcgaaaatctgccgcgaataggcataaataatcgagaaaaagctcgcgatcagcccggcgagaccgacaaggttgacgaagctgcccatccacgtcgaaccgccgtaggacagcgccagcgcttcaaccagcgggttgccggacttgatcaacgcataggtgccggcgccgcccggcgcaatcaccagaatcagcagagcaaaactggtcagcaccacaatggcgccaatcaggccacggggcaggtcgcgtttcgggttcttggtttcttccgcggccagcggcacaccttcaacggcgaggaagaaccagatggcgtaaggaatcgccgcccatacgccgacgtagccgaagggcaggaaagtgctggcgcccttggcctcggtcaccgggatgtccagcaagttggcaacattgaagtgcggcaccatcgccaccaggaacacgcccaaggcaatggctgcgatggcggtaatcacaaacatcagcttcaaggcttcgcccacaccgaagatgtggatgccgataaagatgatgtagaacgccaggtagatcatccagccaccgatgccgaacaacgactcgcaatacgcgccgataaataccgcgatggcggcgggggcgatggcgtattcaatcaggatggcggtgccggtgaggaacccgccccaagggccgaaggcgctgcgggcaaagccgtagccgccgccagcggtagggatcatggaagacagttctgccagggaaaagcacatgcacaggtacatggtggccatgagcaaggtggcgaggaacatgccgccccagccgccctgggccaggccgaagttccagccggcgtagtcgccggaaatcacataagcaacgccgaggccgaccaacagcacccagccggcggcgccttttttcagttcgcgttgttggaagtactgggagtcgactttttcgaagtcgacggaagagccagtgggttcgctaggcatgggaaagtaccgtccgttcttattgttttaactcggcgaagttgtgccgaatgcaagccgcaagtacttgtgaagctcaaactgtgggagctggcttgcctgcgatgaggccagcacaggcaacatttgtgttgggttacacaccgctatcgcagcgatgcggcgacccgacaagccagctcccacacttgattgcatttcaagttaagagccggccgcctgctgcagggttaagtcagaagaaacccaacggattaatgtcgtagctcaccagcaggttcttggtctgctggtaatggtccaacatcatcttgtgcgtctcacggcccacaccggatttcttgtaaccgccgaacgcggcgtgcgccgggtacaggtggtagcagttggtccacacacggcccgccttgatcgcgcggcccatgcggtaggcgcggttgatgtcgcgggtccacacgccggcgccgaggccgaactcggtgtcgttggcaatcgccaaggcttcggcttcgtccttgaaggtggtgatgctcaccaccgggccgaagatttcttcctggaacacgcgcatttcgttggtgcccttgagcagggtcggctggatgtaatagccgcccgccatgtcgccggtgagctgctcgaccttgccaccggtcagcagttgcgcgccttcgcctttggcgatttccaggtaggataggattttgtcgaattgttgctcggacgcttgggcgccgaccatggtgtcggtgtccagcgggtcgccgcgtttgatctgctcgattttcttcatcaccactttcatgaagtcgtcgtagatcgactcttccaccaacgcgcgcgatgggcaggtgcacacttcgccttggttaaagaacgccagcaccaagccttcggccgctttctcgatgaacgacggctcggctttcatgatgtcggcgaagaagatgttcggcgacttgccgcccagctcaacagtggacggaattatgttctcggccgctgcgtgcatgatgtgcgagcccaccggggtcgagccggtgaaagcgattttggcgatgcgcttgctggtggccagggcctcaccggcttctttgccgtaaccgtgcactacgttcagcacgcctggcggcagcaggtcgccaatcagctccatcagcacgttgatgcccagtggggtttgctcggcgggcttgagcaccacgcagttgccggccgccagggctggcgcgagtttccacgcggccatcagcagggggaagttccacgggatgatctggccgaccacgcccagtggctcatggaagtggtacgaagcggtgtgttcgttgatttcggcgctggtgccttcctgggcgcggatgcagccggcgaagtagcggaagtggtcggcggccagggggatgtcggcgttgagggtttcacgcacggccttgccgttgtcccaggtttcggtgatggccagcagttcgaggttctgttcgatacggtcggcgattttcagcagcaccagcgagcggtcctgggccgaggttttgccccaggcgtcagcggcggcgtgggcagcgtcgagggccttgtcgatgtctttggccgtggagcgcgggaattcagcaatcgctttgccgttgaccggcgaggtgttggtgaaatagttgccatcgaccggcgcaacgaattcgccgccgatgaagttgccgtacttggccttgaacgaaacgatggcgccttcagtaccggggtgtgcgtaacgcatggtgggtatctcctgacttttatgtttattggagtacagcgatattgcgcttgataaagcgtagagcaaaggttgggccagtgctgtacgggcccgttaaatcgggagcctgggctgtattgcaaggcgttgctgtagcagggttggcacagggtgggtgacagtttgtgccataaacggtacagcccatgaccggcgggtcgccccagggttgcaatggtcggaatgccgggggatgctggccgttctcacgcagggagaataataagaaatgcacaacgatcatttcagtcgccatgcccagcaagttctgaccgtggcgcatggccgcgacccgtccagcgatccgtccatcgctcgctcctggctgcgctgcctggaggactatcacctcgacccagccttgagcatcgcccccaccgtgcttgaacacagccgcttgctggaaagccgcgagcgcctgcagcaagtgctgcacatcgccggaggcgagatgaacagcctccatcaacagctttcgggcgccggccacgcagtgctgctgaccgacgcacgcggggtcatcctcaactgtgtcacggcgccgtccgagcgcaagattttcgagcgcgccgggctatggctcggcgccgattggagcgaggcctgcgaaggcacgaatggcatcggcacctgcctggtggagcgccagtccttgaccatccaccgtgatgaacattttcgtggccgccacaccgggctgacttgctcggccagcccggtgttcgacccccatggtgaattactggcagtgcttgatgtgtcctcggcgcgcgaagcggtgtcgcgccagagccagttccatacgatggcgctggtgaacctgtcggcgaagatgatcgaaagctgttacttcctgcgccattttgaacaccattggctgctgcgttttcacctgcaggcggagttcgtggggtcgttcagcgaagggctgttggcgttcgatggcgaagggcgagtctgcgcagtcaaccagagtgcgctgaacctcttggggcaagtgcgtgcagggttgctggggcagtcggtggaggcgttttttgactgttccctcgaccagttgctcggccgtgccagcgcgaatgcgactgccagttggccattacgcacgcgaagtggtcggcctttattcgctacgttgcgtggccaacccggcgccgtgccgcgccctcttgccaagcctgaaacgccacggacgccgggaatctgcctggttgatccagcgttgcacaatgactttcgcaaggcactgaaggtattcgagcgcgacgtgccgctgttggtcaacggcgaaaccggcagcggtaaagaagcgtttgccaaagcggtgcatcaagccagtcaacgtgccgacaaggcgtttgtagcgctgaactgtggcgccattccggaggggctgatcgaaagtgaactgtttggttatcgcggtggcagttttactgggggccgcaaggagggcatgcaaggcaagctacaacaggcagacggcggcacattgtttctcgacgaaatcggcgacatgcctctggccctgcaaactcgtctattaagggtgctggaagatcgtacggtggttcccattggtggtgagcctcaagcggtcaacgtcagagttatcagcgctacccaccgtaacctgccggagcgcgtgcaggacggccatttccgtgaagacttgtactaccggcttaatggcctggaaatcaccctgccgccattgcgcgagcgcagtgacaaggcccaattgctggattttctactggcagaggaagcagcggggcaaagggtggcgctggatgtggccgcaagccaggcactgttggcgttcgcatggccaggtaacatacgtcagttacgtactgtgctacgcacattggtcgcgctttgcgagggtggggtggtctgcgtcgaggacctgccggcgatgattcggcacgcgcgccctgaacgagttgacgcgagcactacattcgcctttggagatgcagagcgtgtggttttgcttaacgccctggaacatgaatgttggcacatgactcatacagcaacatacttaggcgtgagccgaaatactctttacagaaagttacgaaagcatggcgtcgttcggcgctcggtaacttagcttgcagtaattaaggatttatcagcggaaaatgaagaaagttggaaaaagttgtagcgttgccaatacttcagcagcattttgttgcacggttaaagtgcgttgagtttgctgagtcgcagagaggatgttccagtttttgaaagcttttggtacatcttctgaggatagtgacgtgtaacgcgtaggcaaggcgaccactcactgtatgaacggcgaatgaccgtttttatacagaggttgcgaaatgaccaatatcaataactctaccgggctaggggctcctgcctttagcgctaattatcttaaacgcgtagctgaaaaccctgatgaaactttcccatccttgagtgttaaggcttctgggcagtttgcctcacccctggctttggttgcgcaacgggggctgaccagtgacgcatcaatgcacagcggtgctcgaagcaagggggacggccgggggaggacgaagcgcagtgtcgagcaacccgacacgcttgcctcgcgtgcagtagcggatgcatgggtggcgaaggcatttgcacgcgcatccgctgactacgtctttcaaactcctgttattccgcctgatgttccagtgccaacagcttccacactggggcgttggcgtacgcaactggatgatgccttcaaagatcctatgtttttggaatgggctgaagagcaagggctggatacgaaagaactggagttaaagccttcaacgggcgaattgacaggctacgttggcggtaaaaaacacaccttttctctctccgacgaatcaggatggtctgatgtttcccgaggactgttatctgccgccaagatcatcgtgcccgagtcaagcggcgtaattgtttacccttggcctgagggcaaagtgcctatggctgaggtgggagggttttacgatcagccactgttcctcacgctcgcgcaagcccacctgcaactgcggaaattgaaagagttcgagagtttttcgttcgtaccgtcgcgttatgcgtcgcaacgatctccagaggctttggaggagcaacagataatactgggcgatgctgcaaacgatcacgcgcttattactgcgctgaagttacaggccaatgaccccactggcagggttaatttaaacaaggtcatgatccccattgatcaccgttccacgtatttcagaatgattgacgagatgcccgatgaggtaagtgtggccgacgttttggaggcctatgacctgcatgtgccagcgaatgccagacaagcccataatttggccgccgcactgtccattgaccttgctcatagggcccctcaagtagacaaaggtggggtgctgcctttgacccggcgatcggaacctggaacgctaaacgctgaagccctgaaacgcctggggcagattgtggatagctggaaggctcaaccgacaaccataatggcaaatgcttcgggcgtgcagggagcagacagtctattggcgcgattaatccgcttcctgcccgagagcacacgaaatacgattaaggataatcccgcagctgcattggatgcagtcattcgctcacctgaagcgaaagcatggggcacgcaagtgcaactgaaactcggcggagtagagacatcgaccagtgctattgagtatgtgagtgcggcactggcacttgatctggatcccgatgcgggaggaaagcgtcataacctgatgggctacaacccgtataaccacgagaatattggtgcttcacctgccgagattgtcgagcggttcatccgttaccttgaaagccgcgtcggggttgaggccgcgcctgttgcagcgaggttgttgttatcaatcagcgcacccgagtttttggcgaaggacctgccggctgaccttatctatggttctcatacatgggtcacctattcgatcgaagcgttgcgtattgagaaaaaagtgccgggtgcggtggcaaatatgacgtttagccaaatcatgctattcggccagaccgagcccatttctgaagcatgtattgatgagttgaatgaagtcaggcgtcgtccggttatcgactgggggctggctaaccaagttataactcaaaggacgacagaagagtacacagctgacgattacaacctttgcgtcaaggcgattcttcagcagcagaaagagcttggctgggcgaaacaggtcatgagtcggtcaccccggacgcgcaaagatattgcgcttgaagaacttaagagggtttttggtgaaggcataaacttcgaaaaagaagtgctatcagacgcaagaatcgagtggccacacgcgtccagctattcattgctggatctttatatgtccaatcatttgtcttggggcgaatgggtatcgagcgacgaggcggcggttccgttcagtaaagtgcggcgagagctgggtaagctgcatgctgatatcagttccgtgtttgatgaacagttttccaaacatcaagcgagtcgggaagcggcttttaatacgcttttccggtatcacgtttcattgatgcccgccgtggaacgagatattttagggcgatcggatattagtttgtatgcggtgcgcaaaacgtatgatggcgataattatgtcaagattggtgataaggaggtttataagccaggcgttaagccgagtccggaagaagtggagcaactgacggggcgtcatggcttgctgattcaagcggaccgtgggaatggcacctttgacttttatagctattttccggcgtcgggcaaaatcatcaaagagcctgggttaacgcgcgccttggtgagccgcccccaaaagccctgggtagggtcaactaatttcccactcaacgatttaggcgatgtgctaaagattgacgataatccttatcacggcaaaccccctagtaaaaacaagtcaacatcgaggatcttagtggaacggctagcaccgcccaacacagatcgctcgtctgcgttgcaaccatttgatagcaagcagccttttaacggaaattatttttctaaaagaactcgggcattaggcgctacggccagcctccattttacacacggagccgccagtgttagagcgcacgcaagaggtagcactaaagtagaaaaagaaaggcaaaccaataaagcaacaagcgagtttttccttagtcttgttccgttttatgacggcatagtgtcggccataaatggagatgtcgccggggccgctttcgaccttggcttcgacgcgctgggattttttctcccgagctttggtgccgggaaaaaagcgttgaaaggtggtcgcggttggctcagggcggtcggttcaggtttggctaaaggtaccgcagcttctttttccctcgacgacctttttgcatcacctaaaaacatcaagaacgggttgaatgcgttaagtaaaaaccttgatgatgtgatttcactcgggggaaaacggacggctcgagctggcaatgtctttgatccgaaaaagaagtatgttcatggtgatgttgtcagagacttttaccaaaaacgagtcggtgacgttgatgcgatgactcctgtgtcggccatttttcttagaggaggctggtacgcttacaatgtactcacgaaaacaccctctggcatacaaatggcgcaatacggtgttgtccatgcagtcacatagtaaaaggtacgtgtgatcaacacgataaaatagacgtcgaggcgacatctgcttcaggcttactatcgtgtgcccgatctaattgagggtgaataagatcttggttttataagttttatttgaaccttttttcttgagttaccactcaattgctggaggaaatggatggcttcctaatgcattttaatcattaggtgaactatatgaatatactgaactccgtaattccacaagtcgctctcccgcaacatgccttggccgctgatgctctagggcaatcagctacaaaagcacctggcgcggcagttccgcaccctcataacccccctgtgaatactaatgctcaggcagcgtctggcattgaatacgagatgttcgccgatgaaggtgatcgtttcagtagagaggagcggggcctcagttcgaagctttttaagaagaaaaatccgggtgttcctgacagcagcactccgcacggcaataagtctcccgaggtgcagaaaacaggtggttccaatgcacctgctccgggtggttcgggaagtggtaagtttgatcaagacattattcaggagcaagccgagtttgaggtgggggggagttactccagtaaacttggtagtgaagaagtcagtatcgtcgtgcctaccagttcaacgctatacgttcccggcgctaacgtgaatgggaaggccgtctcgcccttttccaacgaatctctgaagaaggcaaagcaggaatttgaggacgccattggcgttcctgatggcaagtcggtagagaccccgaagctcgatgacgcttcagtgatagcgcctgttaaaccgccactctcagataccaagaaggctgtgattgcactggctattaccggtcttggaggggccgtggttaccgcgattgttgagcttatcaaaaagtacgtgcctgacgatgcggccgctaaaataaaaacgacgcttgctgacaccaaaatagttgatcaacttcagaacgacgtatttgaaacagcgaatctgatggctatattggtggggagcaaggaaataaagactgacttggaatgggccaagaagtcagatgagcagcgtatgacttcgcttgagtcgatcgtgctggaacttgagaaaggctttggcaagctggccaaagagtttgacattcctgttacgttcgcgctgtcgcgcagcgaagatacaagtatcgagggtcgtgcaaaaaacattggggatagactggctgttattgtcgacgttagcctggaactcgcaccgcatatcaaggctagccgctcgtaagaaaaatgggttggcttgtccgtaggtcaatgtgcctttgtgcactttgcggcgcatagcccttctcgacagtgccgttgtatttgatgaggttgcgtgcacgcggccccttcgaatgcaatggcattttttgtttgcgcgtggcgacgccttttcatgtgctgaatgtttcgcctgaaatgctttggaatacgttaacaaaagcggctgcgtcatttatggatcctttcgccactcagtgcatgaacagaggttttgtctgattgacatgcgaggcggttaaatgacgggtattttgggttccaatgcagcgccaatcctttccagcaatgtggcaagacagcctgagccgatagccaagtcttctgcgacaaccactgcgccacccctcggcgatgcaagggatacgattgctgatacgcctgaagctcgcgcaacggctgacgctcggttggcgaggcccttcgcgattgcattggcgacacgttcctttcacacctcaatgccgccgcctgatgttgacgttcccgcgcagtccacgctcgggcgttggcgcactcaactggacgacgcttttaaacgttctggtttccttgcctgggcagtggaacaggggcttgataccaaaagcttacagttggatcccttgctcggtacgttggccgggagggtaaatggcaaagcacacacgttttccctgatggacgattcgggttgggccgatgtttcccgaacactgctgtcgattgccagggtgatcgcgccgaaccctgggcaggcgttcagttatccctggccggacggcaaggtgccgttgtacacggtggggcgattttacggcgcgcctatagacctcacgcctgcacaagcctccttgcaccgtcagaagttgagaagtggggctcggtttgaatttgcgcctgtggccaatgcgttgcagcgatcgcccgaagcgttaacgaagcaggggacggagttgggtgatgacgctaaccgtgatgcactgattgctgcgctgaggtcccaggcaggcgatgccggagggagcatcgatttagggcagatcatgatctccattgacccgcgttcacgccggtttgccagcgagcagcgccgcgagataagtgttgcacagtacctgcagaatgacggctttacggtacctgccaatagcaaggatgcatatgacttggctgacgcgttatcgtttgaccttgcccatcgggcccctggagcggacgctgggggggtaaggcatattgcccgattgttgagtaaaaccgagctgcgcaagatgggggctgtggttgctcaatggaaggcacgaaacgggcttgctgagccccaagcgggtcccggagcaggcagcttattgcatcgtctgatcagcctgctgcctgagcccaccaggaagttgattgcgaacaaccctgcgtcagcatgggacctgctcattcgttcacctgaggcgcaagcggtgggcgaagccatacaaaaaaaacttggattggccgagtcgccgaccagcctgatggagagcgtgagtgccgcgctgctgcaagaacttgatcctgcgctgggccagtcatgcttcagcgtggcgggttataacctttatcaaaaagataacgccggagcctcagctgccgaaatagtcaaacgctttacggctcatcttgagactaaggttggcgttgaggcggcacctgtggctgcgcaactattattgtcagcggcggcccctgagtttctggtgaaagccataccgcctaatcttgttcatggttctcacacgtgggaatctttttccacagcggttgcattggtagagcaacaagcgcctggcgcatcggcgaatatgacgttcagtcaaataatgaaatatgcggacgcccagcttatcgtccttgaaggtgagagccagttagaggtggcgtcgatacaaccactcattgcctggggattggcgaatggagtaatcgaaaacaacccaaaaggcgagtatacgtccagcgacgtcgagcgttcgctggtgatgttgaaagaacagaaaaaagaattggacagtgcgcgtactcatttatttatgcctgcaccaacgcggcaggaactggcgttggctgagttgaagcgagtctttccggggttagacccttcatcgaaaatgctgcgtggcgtttatgataaaagttatgtggtgtctctgcttgatgtctatatgactcagccgtttgaaccggataattgggtgtcacgcaacgaaaaggagtttccgtggacgcaaatgaagccccgcctatccgagtctcccaatatcaacactgttttttctaaaaattttgaagcgtatagaaaaagccacgaagaggcttgggctattcagttcaaatatcagatttctttgttgcccgcggcggaacgagagcgcatacaacaggccgaggttagcttcatggaagtgtctcggccctttctgggtacagagctcgagccaggcctctccctcaatccagcgcgcaggccacgaaaacctacggcacaggaactagaggatttaaaaggaaggcatggcctgctgatgaaagtggaagggggggatgggcaggttgattactatagttacttccctggcctagggcgaatcgtgaaggaaaagggggggccgggagagcaagcccatttcgacgacagtgcctactttggcaagggctccaaaggtcgcgtacccggcacccataatattcttacgccatttggcaagcccaataaggaccgtgacgcgtctggtgctgttggcaacgccaagggttcttatttttccggcaagagcggttcgttatcctgcgtggcggggcgtttttttacgaaagactacgatggcttgaaagcagagtctgccggtgagacagccgtagagaaaaatacaaagacaattaaaaaaataaatgagtttctgctctcactggttcctttttatgatggtattcaagacgcaatcaacggaaacgttgcgggggcaatatttaatatcgggttcgatattttgggctttcttcttccgggggctgcggcggggagcaaagcgttgaaagccgggaagtcgctgggaaacgccttgcggcgctcattttttgccggggttggcgcttctatcggcgtcactgatgtgcttgaccttccgaagaatatcaagcgtggaatagttaccggtgctagagatattagaacattgcgtagacaggccgatgaggtagggcctcgactgaagggtaactatcaatcttatgatgttacaaggcactataacgacggcgatattgtaaagggggcgtccctgttggagacggatggtgtgttgacgcccgtggtcgctattttcaagaaagggcgttggtacagttatagtttcatcacacgaacaccgtttggtcctcaattagtacaatttggcagtttaagcgtgctggaatccctgaagtccaattcaacaatgccgcagagaacggatctgccagcgttcgaggcataattggaggtatatttatattgctctgcggtgtcgcgcgttgatctaagtaagtgcgtgcggtacacggggggcgtgtcgatgtgtttcgttgtttgatttcccgaaagtaacgtgatgtttattggttatgttggaactgttcaagtgttttgatcaccaatcaagtgagggtaagggatgactttctaatgccaattaatcattaggtcaatcattatgatatttttaaactccgttatgcagcccgtcgcactttcaaagtttggggattttttcagtggtggatggacccgagttgttgatgtgcctccacctccaagggcggttgaagtttccagagtgacaggcgagtcaggcgttcattcgggaaggggggctgacgcctctggtcatacgcctgtcgattccagagttaacgggtttgacacgcccgggcatgcgagcggtacccgagcgcctggagaggctggcgaaatagggggggccgaatctccagcgcttaatgcctacagagaagcacaacaaaaaaagtggcaactcgaaaaagacgcgcaagcccgagataagttgtttgaccagccgagagcgggccgagtcgatggaaaagaagttgaatctttttctgccagtgccctggaagagagcgccgaggccttggtgaaggctgaaagggctaaccccatgcgacgtaaagatattttcaagacagctgcaatcacggccggtatcaccgtagctcttacattggtcgcaacggtaggcagcggaactattaacgaactcctcaagccctacctcaatccgcagccggtcgcggcgacagaacaaggcgtcatggacgggcagttggtggggcagaccatgcagcgtgtattcctgttggccaataccttggcggatcttcgttcagagccccatgtcgggccatctgtggcatggatggcgaacacccatgatgagcgaatggatcatctggaagagatgctgggttacatcgaggtggagtttgccaaagaggccgttaagtcagggataccctttcagatggcttcaacaggcaagcaagaagacgatatcaaaagccgtgcaacggctatggagttgaaaatggcggcccttacggcattgatgggcgccatgaaggccaagacagggaatgttgctgtatagggcaacgttggctttttgccggttgaaatgatgttgccggtgatgaaaagcctttcaacagcgctgctggatgggtgggacatgagatagccaccgaatgcagtggcgctttctgtctgacggccgacacacgcaactgcgtcctgatgcccgagcggcccacctaaagagtgcgatttcccacgccctgcgctaacctgcctcgatgttttacgaggtcgactatgcacattcatattcttggtatttgcggcactttcatggggtcgatggcggttctggccaaagagctgggccatcacgtcaccggttccgacgccaatgtctacccgcccatgagcacgcaactgcaagcccagggcattgagttgacccaaggctacgacccggcgcaattcgacccggtcccggatctggtggtgatcggtaacgccatggtacgcggcaacccggcggtcgagtatgtgctcaacaaaggtctgccttatgtttccggccctcagtggcttgcagaccatgtattgcaagggcgctgggtactggccgtcgccggcacccacggcaagaccaccaccagcagcatgctcgcctgggtgttggagcatgcgggcatgagcccgggctttttgatcggcggcgtgccgcagaatttctcggtgtcggcgcgtctgggtgatacgccgttcttcgtgattgaggccgacgaatacgacagcgccttcttcgacaagcgttccaagttcgttcattaccgcccgcgcacggcgatcctgaacaaccttgagtacgatcacgccgacatcttccctgatctgccagccatcgagcgccagttccatcatttggtacgcaccattccaagcgaagggctggtgatccatccgaccaccgagcccgccttgcaacgcgtgatcgaaatgggctgctggaccccggtgcaaaccaccggcgggggcgggcagtggcaggtcaagctgctcagcgaagacggttcccggtttgaagtgctgttcgaaggtgcagctcagggcattgtcgagtgggatatgacgggccagcacaatgtcgccaatgcgttggtaacgctggcagcggcgcggcatgtcggcgtggtcccctccatgggcatcgcggccttgagcgcgttcaaaagcgtgaaacgccgtatggaaaaagtcgccgacgtaaacgcaattaccatctacgacgactttgcccaccacccgacggccatcgccaccaccctcgatggcttgcgcaaacgcgtcggggatgcgccgatcattgcgattgtagagccgcgctccaactccatgaagctcggcgctcaccgtgatgggctgccggaaagcgtcaacgatgccgaccaggtggtgtggtatgcgcccgccaacctcggctgggacctgccggcgattgcagcgcagtgcactgtgccttccaaggtgtgcgattccattgagggcatcatcgagttcgtcaaacaacaggccaagcctggcactcacgtggtcgtgatgagcaacggcggcttcggcgggctgcacggcaaattggccgaggctttgaaatgagtggcccggaacgcgtcaccctggcgatgactggcgcctccggcgcaccctatggcctgcgtctgctcgattgcctggtgcgcgaagaccgcgaggtgcactttctgatttcaaaggccgcgcaactagtgctggccaccgaaaccgacgtcgccttgccggctaaggtgcagaccatgcaagccttcctcaccgagtacaccggtgcggcggcggggcagatcagggtctacggtaaagaggactggatgtcgccggtggcctccggctccggtgcgccggcggcgatggtggtagtgccctgttccaccggcactctgtcggcgattgcgacgggcgcctgcaataacctgatcgagcgcgcagcggacgtgaccttgaaggagcgtcgccagttgatcctggtgccgcgtgaagcgccatactcgagcattcacctggaacacatgctcaagttgtcgaacatgggcgtgaccatcctgccggcatcgcccggcttttatcatcagccgcagaccatcgatgacctggtggattttgtcgtggcgcggatcctcaatctgctgaatatccctcaggacatgctgccgcgttggggcgagcatcatttgagcagcgatgaataaactcttgatggttctgctggcgttgcagctggccggctgcgcgactgcgcgcacgctcgacgccgcgcaacccggtgcgccggtggtgtatgccggtacgcgcctggatttgtatgcgatcaatggtgggtgctgtgccagggacaggtttggtgccgaggcgccgagctatccgcatatcgacctgccggccagtgcgttgctcgacaccttgttgttgccgctgtcggcgttgacggtgttgggggtgggatttaacgcaaccggcggtctatagcgcctgggccggccccatcgcaggcaagccagctcccacaggggaacgcattccaaaggtgggacctggcttgcctgcgatgaggccggtacgggtacagaggaattatttgccgagcttgcgaagctcatccgactccactgtccgcactccatcctgctcttccagcgccaggcgccacatcgcgcgggccagttcgcacacttcgatgccgtggtacttgcccggaatcaaccgcgataacggcccggcgattttctcggccaggcgcgtttccagtcgctcccccagcaacaacgaaggccgcacgatggtcagctgtggccagtcctgggctttgagcgcctgttccatctcgcctttgacgcggttgtagaaaatcgaggatttcgggtcggcgccaatcgcactgatcacaatcaagtgccgcgcccccatttcccgcgcgcgcttggcgaacgccaccaccaagtccaggtcgacggcgcgaaaggccgcctcagagccagcttgtttgatggtggtgcccaggcagcagaaggcgatgtccacctggccgctcaactgcggcaggatcaccgccgggtcgttgcccaccgggttctccagatgcggatgttcggccagtggcttgcggctgggcgccagtacgcgggtcacagtgggttcgttgagcaggcggtcgagcaagtgttcgccggtcaggccagaggcaccggcaagcaggatatgttgtggtgtcaggtacatggtgtttcccccttgttacacgttacagcttagttgcctttggcttccttgctattcatagagacgctttcgagcgcctttcgtgcctgctgtttacgtaataattgccaatgggcgatcacgcctttgggggcccagatctgcggttcggaggcttcgaagttgtccgcctgttcgcgttcggccacgtgtacctgtgccagtttgaaggcctgctgcaaatcgtcggtctggttgaaggcctgcgcgaaaagagcatcgccgaagtaggtgaagtccgcttcctcggagcagccgaaagacacacgatcggcgcgggaggccgtcatgatcagggtgcgctcatctttcagggccgggataaaaccgcccgagtagcaggccgatatcacgatgatcttgtcgcggttcttcaacggggcaagcacgttcgccaactcatcggccggcaggtcggccagctccatgcgcggctggtcgagcaccagttcatgttcatgggtgccgtggctggtcaggtagataaacaccaagtcttccgggcccgtgcgttcggccagggtttgcacggcgcggcgcaggctttcgcgggtggccagggggcggtcggcgatatggtcgcggtggttgaccaggcgaatctgcccgcgcgcgccgaagcgggtggcgagcatgttgctgacgtaatcggcttcgcgcaggaacacgctttgcttgccgtcgccggccagcaccagggtgtacagctcgacggcgggggtggatgcaggcacggcggcgagggcggcatcaagcaggcggccctgggccagtattccggtttccaatgggtccggcagcagcttgccgtcggcgtcacgcacgcgcatgccgttgacccaggtgccggcctgcacggtgccatcggtcaatacgagagtgcctttgccctgatagctgtcgctgtcgaagccgccgatatagaagctgccgtcagtgaggttcaggcgaccgtcgccactgaaacgccactcgctgaactggccgacataatggctgccgtcgatgccgatcaactcgcccttgccgctgagtgcgccttccttgaactggccgatccacacgtcgccgtcggcgttttcgtagcggcccttgccgttgagctggttctgcttgaactggccgacatagatgtcgccgtcggcgctgttgaacgtgccgttgccctccagttggccatccacaaagtggccgctgaactggttgccgctgtcgtcgttgcgctggccttcaccgttgggcttgccgtgggcgaactggccctgatattggctgccgtcggccaattccagacgacccaggccggagtactggtcgtccttgaattcaccgcgataagtcatttgcccctctttgagggtgccttcgccgttgcgccggccattcttgaaaccgccgacgtagctgctgcccgccgtggtcaggctgccctggccgtcaaacaggccttgctggaactgacctttgtagacttcgccgttactgccgtgccattcgccctggccgtgccactggcccttgtcgaactggccggcgtaccaactgccgttgggatagtccacccggccctggccttgcagcaaaccattgaccacatcaccccggtagcggccgccatcgggcaggcgcgcatcgggcggcaacagcgattcgccgtctccgcaagcggtgagcaacagggcaagggcaaggggagcgagtgggcgcatagcgggatccggataattgagcgccgagtatgccgcagctgcgagattcatacataaatttacatacactgtggcaaggtttatcacctcaccacaggcacggccttacacgaagcagagtgacaacgactcggcgatgtaagcaggtttttcctgaccgtcgatttccagggtggcggtggccttaaatagccattggccaggttttttctcggtgacgtcagtcagggtgacgttcagacggaccctggaattgactttcaccggctggataaaccgcacgctgtccaggccatagttgaccgccatcttcaggccttcgggcatgatcaggatgtcttccatcagcttgggcatcagcgacagcgacaggaaaccgtgggcgatggtgctgccgaacggtgtttgcgcggccttgaccgggtcgacgtggatgaactgatgatcaccggtggcttctgcgaacaggttgatgcgcgcctggtcgacggtgagccattcggaacgtcccagttccttgccgacataatctttgagctgcgctacaggtacatagggcattgcgactctccttggtttcatcggtttttataggtgtgcgaattccatggtagatcatcacgggcaactggcccggtcaacccaccatgcttttggcgaatgccggagcatagggtgggcgtgcttataatgcgggcgtgcgaaaaagggggagagaacggatgctgttacggggcctgacatggctggtgctgtttcaattgatcggcaccgcgatcaaccatttgctgttgccggtgctgccggggccgatcatcggcttgctgctgatgctggggtttctgatctggcgcggtgaggtcggcgagcccctgagtctggctgccagcagtttattgcgttacttgccgttgctgctggtgccgccagcggtgggcgtgatggtgtacgcgaaggacatcgccgccgacttctgggccatcgtcggtgcgctggtgttgtcgctggtgatcgccatgggttttgtcggcgtgctgatgcagcagatggtcaagcgcaaggaaaaggatcaatgacctttgactggcagggcgcttgggctgccgttattcatcatcccttgttcggcattggcatcaccctcggcgcgtatcagttggtgctggcggccttcgagaaaacccgctggatcttcctgcaaccggtgttggtgtccatgctgctggtgatcggcgtgctggtcagttgcgggctgacctatgtcgagtaccgcaaaagcaccgaaatcatgggcatcctgctcggccccgcaaccgtggcgctggccgtaccgctgtatttgaacctgcggcggattcgccaattgttctggccgatttttactacgctggtggtaggtggggtagtggcaaccggcatgtgtgtgctgctgggcgggtggttcggtgccgaacacaggatgctgatgaccatggcgcccaaatcggtgacctcaccgattgccatgctggtggccgagcagatcggcggcgtggccgcgctggcggcggtgtttgtactgatcaccggtgtgatcggtgcaatgatcggcccggcgtacttgtcacgcctgggcgtgcacagccctgaagcgcgcggcatggccctgggcatgactgcccacgccgttggcacctcggtggcgttgcaggaaagtgaagagtgcggcgccttcgcggcgctggccatgagcctgatgggcctggccacagcggtctttctgccgctggccgtgtcggtgatggtttaaacccgggtttgaaggaaaccttatatgagtctggcgctgttcccgctcaataccgtgctgttccctggctgcaccctcgacttgcaactgttcgaggcgcgctacctggacatgatcagccgctgcatgaaaaagggcgaaagcttcggcgtggtgtgcattctcgacggcaaggaagtgggcatggccccggacggctacgcgttgatcggttgtgaagcgctgattcgcgacttcaagcagcaagacaacggcctgctggggattcgtgtcgaaggcgggcggcgttttcgcgtacgcgacgccggggtgcagaaagaccaattgctggtggccgacgtgcaatggctggaggagctgccggaccaggcgctggaggacgaggacgccgacctgctggccttgcttcatgccttggctgaacacccgatggtcgcctcgctggacatgggcacccacgccgatggccagcaagcgctgggcaatcagttggcctacctgctgccgttcaccgaggccgacaagatcgacctgctgcaactcgacgatccgcagcagcggctggacgcgatccagatgttgctcgacgagttgcagggcgaactgttcactcaataggcgtagcgcagcaatgcatgggaagtgccggtgagggcgataaagctcagcaccgcgaccagcgccggcagcagcaaccaccaggttttttgcgacatggccggcaacggcgtgcggtactggatggcggtcaagctgaaggcacacaccgtcatcgccagcagcgtgccggccaggatgtccgttggccagtgggcgccgaggtagacccgcgacaaggcgatgaaggccgccggaatgcagcccatcagcatccaggtcaggcgcagccgggtaggttggccgcgacccgccagcaccgccagcgccaggaaaaacgcaaaggcaccggacgcgtggccgctgggcatgctgaaactggtcagcgggtctgtgagaatctccgggcggccacgggcgaaaaacagcttggttaccgtgttgatcaccgcagcgcctgccagtgtggcgccgacaaacaccgcgtgccgccattgccgcgccagtaacagcaagccagtaaacacagcgctggcgaagaacatcttcttgaattcacccagttgcgtgacgcgcaccatcacttcatccagccacgggctgcggtgctcctgcaccagcgcgctcaggcctgtgtcaaagtcattcagggagtgatagccgataaacagcgcgatcagcagcgtcaggctggcgcagccaatccacaaggtggcgcgacgatggccgcgcaggctgctgttcaaactcaatccgagcaataccgccaaacaggccgcgacgattgccgcttccggccagaagccttccggcagaggcaggcgaaaggcggcaccggtcgcccagcccggcagcaaataggccaccgaccaaccggccgctgccacgatgctgacggcggcgaagcgagggaagggcatgtcgcacatcccggccaccatcggtagcatggggcgcagcgggccgatgaagcgtcctaccaacaggctggcgataccgtacttgtggaagtaggtttctgcgccgttcatccattcgggatggtggcgcaggcccggtaaacgccggattccctgatggaaatgccgacccaggaagtaggacactccgtcaccgaccaatccccccacgaagcccagcaacaaggtttcgctcaacgaaagcgcaccactgcccgcgagcgcagcaatcgcaaacagcaacaccgtgcccggcacgatcagcccggcaatcgccaggcactccacgcacgcgacgacaaataccgccaccgccagccattcagggttcagggtcagccaaccggtaatgctatcgagccattggctcatacactcaactccctctctgtaatccataaccccaagcactggagatcaaactgtgggagcaggcaagctcccacaggggatctgctgtgctgccggtttttgtgttcaatcaatcaaaaagtaatcgcggccttcgacctggccccggcgcagcgggttccgggtgcaatacggcgcataacccgcctccacgaagcggtacatcaggtgttcatcgcgccccctggggatgcccaaacgggtggtctgaatgatttgcgcaggtgcctggcccacgtcttcgacgtaaagcagctcctggtcgaaacgcttggcatcccacatcggcaccttcaagcccagcgccttgcacagtagggtctggcccgcgcagagtttctgggcggggcgcgggctgccattggcatctggattattcagcagcatctgcgccaggctggccggcccggacagctggtctacccacggatacgcagatttgatcagcacggcattgcccgggccctgggcactgaagttcagtgaatcgccgccacgggcgtaatacatgtagatgtggccgccatccagaaacaaagccttacgcttttctgtgtagccgagtgaggcatggctgcctttttcggccacgtaataggcttcggtttcaataattcgcgccgaaagccagatttcgccgacgcgatggcgaatgacttttccgagcaactcgcgcgcaagaacttgcgcgtcacggtcgaagaagcggtcgggcagggcgctggcggggaggtcaggggtaaaactggacatggcgatcagggttaatacggctaaatgtgacggaataataacaactcccaccttaattaccgctgaaggccgggtttttacagttcatttcgaccatccgcccctcaccgctgtcagtcgggcggcgtcgcagctataatctgccgctttcctccctgccaagactccctgaccatgactgagtccgttcttgactacatgacccgcctgggtcgcgctgcccgtcaggcctcgcggttgatcgcccgtgcgagcactgcgcagaagaaccgcgccctgctggccgccgccgacgctctggatgcttcgcgctccgagctcaccgccgccaacgagcaagacctggccaacggccgcgccaatggcttggaaccagcactgctggaccgtctggcgctgaccccggcacgtatcgacgacatgatcgaaggcctgcgtcaggtggccaagctgcctgaccccatcggtgaaatccgcgacatgcggtacctgccgtccggcattcaagtcggcaagatgcgcgtgcccctgggcgtgatcggcatcatttatgagtcgcgccctaacgtgaccatcgacgccgcgagcctgtgcctcaagtcgggcaacgccaccatcctgcgtggcggctccgaagccattaactccaaccgtgcgatcgccgcgtgcattcagcagggcctggccgtggccgagttgcccgccgaagtggtgcaagtggtggaaaccactgaccgcgccgccgtgggcgcgctgatcaccatgccggagttcgtcgacgtgatcgtgcctcgcgggggcaaaagcctgatcgaacgcgtcagccgcgatgccaaggtgccggtcatcaagcacctggacggcgtctgccacgtgtacatcgacatcgccgccgacatcgacaaggcgatccgcatcgccgacaacgccaagactcaccgctacgcgccgtgcaacaccatggaaaccctgctggtgcacgccggcattgccgagcgcgtgttgccgccgctggctgccatctaccgcgacaagggcgtggagctgcgcggctgcgcgcgtacccgtgcgctgctgggcgcggacgtgatcgaagcgaccgagctggactggtacaccgaatacacggcaccgatcctgtcgatcaaaattgtcgacgacctggatgaggccatcgaacacatcaacacctacggctccaagcacaccgacgccattgtctccgagcacttcagcgatgcacggcgtttcctcaacgaagtggattccgcttcggtgatgatcaacgcctcgacgcgttttgccgacggcttcgagtacggcctgggggcggagatcggcatctccaccgacaagctccacgcacgcggcccggttggcctggaaggtctgaccagcgagaagtacgtggtgttcggcgatggccatgtgcgcacttgatgggtaaacgcatcgggctgctcggcggtaccttcgaccccgtgcacatcggccatttgcgcagtgccctggaagtcgcggatgccctcgcgctggatgaactgcgtgtgatgcccaacgcacggccgccacaccgcgatacgccacaggtatccgcgcagcaacgcctggaaatggtgcgcctggccgttgacggcatcgcgccgttggtggtggacgaccacgagctcaagcgtgataaaccgtcctacactgtcgataccctggaagtgatgcgcgctgaaatggccgcagatgaccagttgtttctgcttttgggctgggacgcattttgcggcctgccctcttggcatcgctgggaggaactcctccagcattgccacatcctggttttgcaacgcccggatgccgacagcgaaccgccggatgccttgcgcaacctgctggccgcgcggtcggtaagtgaccccttggccctgaccgggccgaacgggaatattgcattcgtctggcagaccccgcttgcggtgtccgccacccagatccgtcaactgctggccagcggtaagtcggtacgtttcctggtgcctgacgcggtcctggcctacatcgatgcgcacgggctttaccgtgcgtcgaactgaaaaggcgcgcttgacgctacgcaccgtcgtgcagcgagcgcccgaacatacgagcaaaacgagttttatatgacgaacaaagacgtaagcaaagttaagcgtaaaggcaccttcaaaagcgccccgctgccggtagaagcccacgttggccctgagctggctggcgaagaactggtaaaagtggccgtggctgccctggaagacgttaaagcccaggacatccaggtgctggacgtgcgtgacaagcaaagcatcaccgatttcatgatcatcgccaccggtacctcgaaccgccagatcggcgcgatgctcgacaaggtccgcgaagccgtcaaagcccagggcgtgaagcctttgggtgaagaaggcaagggcgacagcgactgggtgctgctggacatggacgacgtgatcgttcacatgatgacctccaacgcccgtcagttctacgacctggagcgtctgtggaaaggcgctgagcagagccgtgctgctgatggcaagcaccacagcccggaagtgggccacgcgcacttcgacaagctcaacaaagaccaggaataaggaacggctgtgcgcctgcgtctgatcgctgtcggttcacgcatgcccaagtgggtggaagaaggctggcacgagtatgccaagcgtctgcccactgagctgtcgctggaactggtggaaataccgcttaacacccggggcaagaatgccgacgtggcgcgcttcattcgccaggaaggcgaagccatgctggccaaggtcggccccaacgagcgcatcgtcacccttgaagtgcacggcaaaccctggagcaccgagcaactggcggtggaactggatcgctggcgcctggattcgcgcacggtcaacttcatggtcggtggccccgaagggctggcgccggaagtctgtgcgcgggcggaccagcgttggtcgctgtcggcgctgacgctgccgcacccgttggtaaggattctgatcggtgaacagctgtatcgcgcctggacagtcctgtccgggcacccttaccacaaataatctgcgcccctcccgatgactcagccgatccgcatcaaggaccacgaaaaagacgcacgtctggtacgcgcgcgggtcgtgttcggcgcatttttggtggtggggctggtcggcgtgctgatcgcacgcctgtatttcctgcaggtgatccagtacgactatcactccacattgtcggaaaacaaccgggtgcatgtgcagccgatcccgccgacccgtgggctgattttcgaccgcaatggcgtggtggtcgcggacaaccggcccagcttcagcctgagcatgacccgcgagcgctccggcgattggcagcagatcctcgatgtgatcgtcgaggtgctgcagctgaccccggaagaccgggtgatcttcgaaaagcgcatgaaacaggggcgccggccgttcgaaccggtgccgatcctgtttgagctgaccgaagagcagatcgcccggatcgccgtgaaccagttccgtctgcccggtgtggaagtggtggcgcagttggtgcggcattacccgcaagggccgcactttgcgcactccgtgggttacatggggcggatcaacgagaaagagctgaaaaccctcgatccggtgaattacagcggcacccaccatatcggcaaaaccggcattgagcgtttctacgagcccgagctgcatggccaggtgggttacgaagaagtcgagaccaacgcccgaggccgtgtgctgcgggtgctcaaacgtaccgacccggtgccgggcaaggacattgtgctgagcctggacatcaagctgcaggaagctgccgagatggccttgggcgggcgccgtggcgccgtggtagcgctggacccgaccaccggcgaagtgctggcgatggtcagccagccgagcttcgaccccaacctgttcgtgaccggaatcagcttcaaggcttacgccgagttgcgtgattccattgaccggccactgttcaaccgcgtgctgcgcgggctgtatccgcccggctcgacgattaaaccggcggttgcgattgcgggcctggattccggtgtcgtcacggcctccagccgcgtgttcgacccgggctactacatgctgcccaactacgatcacaaataccgtaactggaaccgcaccggtgacggctatgtcgatttggacaccgccatcatgcgctccaacgacacctatttttacgacctggcccacaagctggggatcgatcgcctctctgcctacatgggcaagttcggcctcggccagaaagtctccctggacatgttcgaagaatctcccggcctgatgccctcgcgggagtggaagcgcgcgacccgtcggcaggcgtggttcccgggtgaaaccctgattctcggcatcggccagggctacatgcaggccacaccgctgcaactggcccaggccacggcactggtggccaacaaaggcgtctggaaccgcccgcacctggccaagaccatcgaaggcgaaaagccggtggatgagaacccgattcccgacatcgtgctgcgcgacccgtccgactggaccaaggtcaaccacggcatgcaacaagtgatgcacggcgcccggggcaccgcgcgcaaggcggcggtgggtgcgcaataccggatcgccggcaagagcggtaccgctcaggtggtcgcgatcaagcagggcgagaaatatgaccgctccaaagttcaggagcgccatcgcgaccacgccttgtttgtcggcttcgccccggcggacgccccgaaaatcgtggtggcggtaatggtcgaaaacggtgagtcgggctccggcgtcgccgcgcctgttgtgcgtcagatcatggacgcctggctgctggccgacgacggcaggctcaagcccgagtatggcggccccccttcaagcaccgaggttacggcccgtgaagagtaattttgaccgcatcctctccagtgaggatgtgatgcgtcgtcgcgcgacgctgctgcaacgcatgcacattgatggcccgttgctgatcctgctgctgaccctcgcggccggcagcctgtttgtactgtattcggccagcggcaagaactgggacctgctgatcaagcaagcgtcctcgttcggtttggggctgttgtcgatggtggtgatcgcccaactggagccgcgcttcatggcgcgttgggtacccttgggttacgtggtcggggtgttgctgctggtggtggtggacgtgatgggccacaacgccatgggcgcgacccgctggatcaacattccgggggtgattcgcttccagccctcggaatttctcaagatcctgatgccggcgaccatcgcctggtacctgtccaagcgcaccttgccgccgcagctcaagcacgtgggggtcagcctgctcctgattggcgtgccgtttatcctgatcgtgcgccagcccgacctcggcacctcgctgctgatcctcgccggcggcgcgttcgtgctgttcatgggcgggctgcgctggcgctggatcctcagcgtgctggcggccgcgataccggtggcggtggcgatgtggttcttctttatgcacgactaccagaagcagcggatcctgacgttcctcgacccggaaagcgacccgttgggcaccggctggaacatcatccagtccaaggccgccatcggttccggtggcgtatttggcaagggttggttactgggcacccagtcgcatttggactttttgccggagagccacaccgacttcatcattgcggtattgggcgaagagttcggcctggtgggcatctgcgccttgttgttgatctatgtgctgttgatcggtcgcggcctggtgatcaccgcccaggcgcagacgctgttcggcaagttacttgccggcagcctgaccatgacgttttttgtttacgttttcgtcaacatcggtatggtcagtggcctgctgccggtggttggggtgccgttgcctttcattagctacggcggaacttcgctggtgacattgctgtcagcgtttggggttttgatgtcgattcatacgcatcgcaaatggatcgcacaggtttgaataaggtgaagatgtcaatgcaagtaatgcgcggctgggcgactcggcacgcgtcctggatgggcctgatcgggctcttgggcgcaacgcaggaggcgcaggccggtgactacgatggctcacctcaggtcgccgaatttgtcggtgagatgacccgcgactacggttttgccggtgagcagctgatgggcgtgttccgcgaagcccagcgcaagcaggcgattctcgacgcgatctcacgccccgccgagcgggttaaacagtggaaagaataccgcccgatgttcctcactgacgcccgcgtggcgcggggcgtggatttctggcgccagcacgaagccgtgctggcccgcgccgagcaggaatacggcgttcccgcccaggtgattgtcgcgatcatcggcattgaaaccttttacgggcgcaataccggcagttaccgggtgatcgacgcgttgtcgaccctgggcttcgattacccgccacgcgccgagttcttccgcaaggagctgcgcgaattcctgttgctggcccgcgaagagcaggtcgacccgctgacgctcaaaggctcctatgccggcgcgatgggcttgccgcagttcatgccgagcagttttcgcgcctacgcggtggatttcgacggcgacggccacatcaatatctggagcaaccccgacgacgccatcggcagtgtggccagctacttcaagcgccacggctgggttgcaggcgagcctgtagtgattcgcgccgatgtcaccggggatcgcgccgaccaaggcctgacccagggtattgagccggccaagacggtcggggagttgcgggcgctgggctggtcgagtcagaatgcgccacgcgacgacatgccggtgacggcgttccgcctggaaggcgaaaacggcccggaatactggatgggcctgaagaatttctacgcaatcacgcgttataaccgcagtgtgatgtacgccatggccgtgcatcagctgtcagacatgctggtccaagcacggggcaacaagtaatgcgggtatcgccgttcaataaaccgctcaagctggtggcgttcgccgcgttgtccttgctggttgtcagttgctcatccaccaccagccgcgcaccggcgcagaagggtggtgctattgttcgcgcccagccgggcctggacatcaaccgcgcccacaaagacggcgcgccgtggtgggatgtcgatgtttcgaagatcccggacgccacacccaccctgcacaccggcccgtacaaggccaacccctataccgtgctgggtaaaaactacttcccgctgcaggaatccaagacctattcgcaaacgggtacggcttcctggtacggcaccaaattccatggccagaacaccgccaacggcgaagtgtatgacctgtacggcatgagcgccgcgcacaaaaccctgccgctgcccagctatgtacgcgtgaccaacctggacaacaaccgcacggtgatcctgcgggttaacgatcgcgggccattctattcggaccgcatcatcgacttgtcctacgccgccgcgaagaaactcggttatgccgaaaccggcaccgcgcgcgtgaaggttgagggtatcgaccccgcgcagtattgggcccagcgtggcaagccggcgccattgatgctcaatgagccgcaaacaccgcagccgcaagtcaccgcgtcggctggcaagatcgaacaatggacaccgccaccggcgcagcacgcacccgacacggtcgtcgtgcctcacgcagcaccgggtgcttcgatggccggtgggcaatacctgcaagtgggcgctttcgccaaccccgatgcggcagaactgttaaggtccaagctcagcggcatggtcagcgcgccggtgtttatcagctccatcgtgcgtaaccagcagaccctgcaccgtgtgcgcatgggcccgatcggctcgccaagcgaagtggcgcaagtacagaacagcgtgcgtctggccaacctggggcaacccagcgtggtcaccgctgaataagtaaaaggattgatggctcaggttcgcctgagccctggttgttggctcgttgaacaataaaaacccgggggcaaggggtgagcgggcaaccgaacacgcgacaggctggcaacggcttgtctgaataagttttgcccgcgagggcaagtttccataagcaatttcgagagacggatgaacatcaccaccttagccaaacgcacgtgcctgcttctttcgctgatcatcaccccggccgcctgggcggttgaaatggtgccggcttccccgcaactggccgccaaggcctgggtcctcatggatgccgccagcggcaacgtgctggtcgagaacaatggtgaccagcgcctgcccccggccagcttgaccaagctgatgacggcgtatatcgcgaccctggaaatccgtcgcggccagatcggcgagaacgacccggtcaccgtcagcgaaaacgcctggcgcaccggcggttcgcggatgttcatcaaggtcggctcgcaagtgaccgtgagcgacttgctgcacggcatcatcatccagtccggtaacgacgccagtgtggccctgtccgagcacatcgccggcagcgaagacgcgttcgccgacatgatgaataaaaccgtgactgacctgggcatgaccaacagccacttcatgaacccgaccggtctgccgaaccctgagcactactcctcggctcacgacatggcgatcctggcgcgcgcgatcattcgtgtcgatccggtgcactacgcgatctactcccagaaagagttctactggaacaacatcaagcagcctaaccgcaacctgctgctgtggcgcgacaagaccgttgatggtctgaaaaccggccacactgaagaagccggctactgcatggtgtcgtccgcggtacgtgacggccagcgcctgatcgccgtggtcttcggtaccaacagcgaacaagcccgtgcggccgaaacgcaaaaactgctgacctatggcttccgcttcttcgaaacccagaccttctaccagaagggtgctgagctcgcgaccgcacccgtctggaaaggcgctacctcgcaagtcaaagccggcctggccgatgacctgaccctgaccatgcctaaaggccagctgaaaaagctcgcggccagcatgaccctgaacccgcaattggttgccccgattgccaagggtcaggtcatcggtaaagtcgaagtgaaactggacgacaaagtcgtgcacagtgccgatctgatcgctctggacgccgtcgacgaaggtggtatcttccgccgcgtgtgggatagcatccgtctattcttctacagcttgttcaactgataagtgtgcacctgcaaagccccgtgttgatccgacacggggctttgcccgtcgccacggcttacgcttacgaggccgttacgccatgaccgataaagaagcagaagtaaaggcgccaaagatcgaattcccgaacgtggactatcccgtcaaggtgatcagcgataccggtgttggcaacaaggacaagattctcgagatcgtgcgcaagcacgcaacgatcaatgacaaccgtgtggatgagcgtttgagctccaacgggaaatacaccacgatccagttgcacatcgttgcgaccggtcaagaccagctctacgacatcaacagcgaactgcgggccaccggcttcgtgcacatggtgctgtgatgtctcaggttctgggctttcgcgagctcggccagatggcctacgagcccgtctggcacgccatgcagcggtttaccaatgaacgcggcagctcggcccccgatgaaatctggctggtggaacacccgccggtgttcacccagggccaggccggcaaagccgaacatttgctgctgccgggggatattccggtggtgcaggtcgaccgaggtggccaagtgacttaccatggccccggtcagcttgtcgcgtatctattgctggacgtgcgcaagctggggtttggcgtacgcgacctggtgagccgcatggaggcttgcctgatcgagctgttggccagttacggcgtgaccgccgcggccaagcccgatgcaccgggtgtgtatgtcgacggcgcgaaaatcgcctcgttgggtttgcgcattcgccacggctgttcctttcatggcctggccctgaatgtggacatggacctggcaccgttccggcggatcaacccgtgtggctatgccgggttggcaatgacgcaactgagtgaccatgcttcaccgattaaatttgccgaggtaagtgcccggctgcgcgcgcagctcgtcaaacacctcgactatgctgagcagacgaccctcacgggcggaatcgactgattatgactactgatgcagtgcaaaccatgatcccgacggtggacgttaccgaccgtccggccccggccccgcgtgccaaggtggaagccggcgtcaagctgcgcggcgccgaaaaagttgcacgcatcccggtgaagatcattccgaccaccgaattgccgaagaagcctgactggatccgcgtgcgcatcccggtttcgccggaagtcgaccgtatcaaggccctgctgcgcaaacacaagctgcacagcgtgtgcgaagaagcctcctgcccgaacctgggcgaatgcttctccggcggcaccgccaccttcatgatcatgggtgacatctgcacccgtcgttgcccgttctgcgacgtcggccacggccggccgaagccactggacgccaacgagccggaaagcctggccatcgccattgccgacctgaagctcaaatacgtggtgatcacctcggtagaccgcgacgacctgcgtgatggtggcgcccagcactttgccgactgcatccgcgagatccgcaagctgtcgccgaacgtaatgctcgaaaccctggtcccggactaccgtggccgtatggacgtggcgctggaaatcaccgccgccgagccgccggatgtgttcaaccacaacctggaaaccgtgccacgcctgtacaaggccgcgcgcccgggttcggactaccagtggtcgctgaccctgctgcagaaattcaagcagatgatgccgcacatcccgaccaagtccggcttgatgctgggcctgggcgagaccgacgaagaagtcatcgaagtcatgaagcgcatgcgcgaacacgacatcgacatgctgaccctcggccagtacctgcaaccgtcccgcagtcacttgccggtgcagcgtttcgtgcacccggacacctttgcctggttcgccgaggaaggttacaagatgggcttcaagaacgtggcatcgggcccgttggtacgttcctcgtaccacgctgacgaacaggccaagctggtcaaggcgagcctggtttcgtaacaacgccgctgccacactctgtgggagctggcttttgtgggagctggcttgcctgcgatagcatcacctcggtgcaccagatacaccgaggtgccagcatcgcaggcaagccagctcccacagttcgttgtgcgacaccgatacggagaacatggatgaccactgaacccgctgccgccgtacccgcccttcgccctgaaggcaccatcggccttatcgcccccgccggccccgccgcgctggacgttgaaaaagccggccaatggatgcgtgcccgtggctatgaattgcggattttctcgggtgtctacgagcgcgacggctacctcgccggcagcgatgatgtgcgcctgcacgacctgcatgccgccttcgccgaccctgaaatcgacgcgatcttctgcctgcgcggtggctacggtacgccacgcctgctcgaccgcctggacttcgacctgttgcgcgccaaccccaagccgttcgtgggttatagcgacattaccgcgttgcatctggcgatcagccggtacgcgggttttgtaacgttccacgggccgatgctcaacgctgacctgctcggcgaaaagcagccacccaccgaatcatcactgctcagtatgctgcgtggcgacctttgcgccggcagtgagctgacgcaccccgtggcctacccgttgacgaccatcgagcctggcatcgcgtgtgggcgcttgctgggcggcaacctgtcgatgattgcggcggtgatgggcacggcgtacgagattgatgccgagggcatcattctgctgatcgaggacgtcaacgagccgatctaccgtatcgaccgtttgctgacccatctgcggctggccggcaagctggctcaggttgccggtgtgctggtgggggatgtggcgggggtggacaaggtggcgttggagcggctgctcaagcagaccttcgaaccgttgcgtattccggtgttgtccggctggcgcagtgggcattgcgacccgaacctgacgctgccgatgggggcgctggtacggctggatgcgggggaacagcggttagtcctggagcaggatgtggtcttcagatagtgggtgactgtgatgccgtcatcgcaggcaagccagcccccacaagggaatgcattccaaatgtgggggctggcttgcctgcgatagcggtagtcgctttacaacaatctattgaccctgcaacgactccagcaacttcaccgttggatacccatccgccggccagcccagtgcttgctgcgccgcacgaatcgccttgcgcgtattcgcaccaataattccgtcagggttacccgcgtcatagcccttggcgctgagtgccgtttgcaggtcaatgcgctgtgagcggctcagcggcagctcatccgtcggccaatcgccacgaatcacaccacccccaccgaaccgctccgacagcaggcccaccgccagtgcgtaagacgacgagttgttgtacttgaggatcgcacggaagttatccagcaccaggaacgccgggccacggtagccggccggcagcagcagggcggcggagagctggttgacgttcggtggcatgctggcgccaggcggcagctggatgccgaggctcatccactcagcgacagttttgcgcacaccaccgtcggccagtgcgtagtcgaaattcgacggcagttgctgcacctcgaagccccagggctggcctttctgccagccagagctttgcaggtagtgcgccgtggaggcgagggcgtcagccgggctgttccagatatcgcggcggccgtcgccatcgaagtcgacggcgtgggtgttgtaggtggtcgggatgaattgggtctggcccatggctccggcccaggagcctttcatctggtcggcctggatatcgccgtgctggatgatctgcagtgccgccagcagttgcgcctgggcaaatgccgggcgacggccttcataggccagggtcgccagggagcggatcactgaattattgccctggaactggccgaagttgctttccatgccccagaccgagaccagcgcctggcggtcgacgccataacgttgctcgatgctttgcaggatgtcggcgtatttgatcagcagtgcctggccgttgcgcacacgcaccggcgacagtgcgccgttgaggtattcccacaccgggcgggaaaactccggctggctgcggtcggcgcggatcaccgccatgtcgggggtgacattggcaaaggcagtatcgaagacggcggcggtgatgccggccttcagggcttccacacgaaagcccgcctgccattcagcgaaggtctgggtcggttggatatcaaggttgtccaccgccagaggtgcaaccacggcaggcgcgacggccggtgcggtttgcagtttcggcaggggttgggcgtctgcggcggtgggtttctccgcgcaggcgacaagcagaatgaggctggaggcagcgatcaattggcgaaagtgccaacgacgggaaagactagagggcatgcacaggtccagggattacaaatcaggtacagaccttatcatgccggaggggcgcttgccttcaggcggccagaaagtaagaagcctcccagctattagactggaaggcttcgcggcggtagctgcctttgcccttgccggcgcgttcctgacggctgcggaacagtggctgggcgatgatggatttggccttgttggggccatgcttggatggctttttgctcatgctgggtactctatgaaggtgggatggaacggtgcaaatcatctgccgaagtggcgcggctgtaaagcccggcgatgggtaggcgttttcgcacggctctgtgggcatgggtaatgtgggagctggcttgtcgggtcgccgcaccgctgcgatgccggcacctcggtttatctggagcatcgaggtgatgctatcgcaggcaagccagctcccacaaaagccagctcccacagggagggagagcgaggttattcagcggggagcgtcaggcgctgacccgccatcaacagcgacaaacggcttaagctcatccacggcgaaccggccgcctggcccttgatctgcgcgtcgatgcgttgcgcttccagcagcagctgcgcccagcgttgcgccgaatgacgctgcagggctttgctcatcaagggtttgcgcttgtcccacacgggcggcctggcttgactgaaggctttgtccagtggaatgccctggctgtattgcagggcaatattggccagcactcgcaactcccgggccagggcccagagaatcactggaggctccacgccttcgccgcgcagcccttcgagcatgcgcagggcatgcgcaggttcgccattgagaatcgcatccaccagtccgaacacatcaaaacgcgcgctgtcggccaccgcaccttgcacggtttcgacggtgatctgcccgtcttcggccatcagcttgagtttttcgatctcctgggcggcggcaagcaggttgccttcgacccgtgcggcgatcagttccacggcgtcttgcgtcgccgacagccccgactgtgacagccgttgacgaatccactgcggcaactggttgctgtccaccggccagatctggatgaattgagtttgtggcccttccaccagagccttgccccacttggtcttctgcgcgctgccgtcgagcttgggcaagctgatcagcagcaccgtgtcttcagcgggccgtgagcaatactccagcaacgccgccgcgcccttgtcaccgggcttgcccgaaggcaggcgcagttccagcaggcgtttttcggcgaacagcgacatgctcgcaccggcttgtagcagcgtaccccagtcgaaactggcgtcggcgctgaatacctggcgttcatcgaagccttgctggcgcgcggcgctgcgaatggcgtccgctgcttcctggcacagcagcgggtcatcaccgctgacgatatagacaggcgcaaggccaccttgcaggtgcttggcgagttgggcaggggcgagtttcatagacggctcgaacggggcgcctggggcgccccgtctggcttactcgactggcacttcaacaggcgattgttttggtgtgttgtcttcatactctttggcggctttcagggcatcggcgtcggccttggccttgttgtcggcggcctgttgcagggcttcgagtttttcaggcgtcagctgctgcaggcggaccatcatgcgctggatcagctcgcggcgcatttccttgcgaacctggatggtttccgagtccgagcccaccaggttgttaccgtcgtggctgacaaccttctgcacttcaagcttgtcgcccatcaatggcaactggtcgcggccacgcagttcatagacaactttggtgttcagctcaatgtccgacgcacggccggcgctggcatagctgaggttacgctgggtttcctgctcgtctgccaggaacagtttgtaggtcgcgccggtgtaaacgtgcacgccgctgttttccagggtctggcgcagttgaaccacggtgtcgccataggcgttacgggcgctgacgtcgagttccttgattgacagttcgttggtgccggtaccacgcagctggaagccgcaagcgctcagcagcacggcaaggcccatcaccagcaaattgcgtttgatcattttgttgctccccttgaaaccatgtcggccttatcgaggccttggaggttttgttcggcgcagggctcaagccctgcgcccgatccgattagcttgcgacaatgttgaccagtttgccgggcacgacgatcactttgcggatcgtcaggccttcggtgaagcgcagcacaccctcattggcgcgtgcggcggcttcgacgtcttcacggctggcgctggccggcatgtcgatctggccacgcagtttaccgttgacctgaatcaccagttgcagcgtgtcctgtaccagggcgctgtcatcctgcttcggccagccggcatcaatgactgcgccggcatggcccaggcggttccacaggtcatggctgatgtgcggcgtgatcggcgccagcagcaacacgactgtttccaggccttcctgcaccagcgcacgatcctgttcagtcgcttgcggggctttttccaacacgttcatcagcgtcatcacctgggcgatggcagtattgaacttgtggttctggcccacgtcctggctcgcctggcggatagccaggtgcgtgcttcggcgaatggctttttgttcgtcgctcaaggaggccacgtccagtttgcccggcaggccctggctgatatgggcgtgggccaggcgccagacgcgcttgaggaaacggtgcgaaccttcaacgccggagtcggaccattcggcgctcatgtcaggcggtgaggcgaacatcatgaacaggcggcacgtgtcggccccgaactgatcgatcatcgactgtgggtcgacaccgttgttcttggacttggccattttctcggtgccgccgatttccaccggcaggccgtcggcgatcagcttggcgctgatgaccttggctttgctgtcacgctcaagttcgacgtcagccgggttgaaccaggtataggcgccgttggcttcgcggcgatagtaggtctcggcgaccaccatgccctgggtcagcaggtttttgaacggctcatcggaactcaccaggccttcgtcgcgcatcagcttgtggaagaagcgcgcatagagcaggtgaagaatcgcgtgttcgatgccgccgatgtattgatccaccggcaaccagtggtcagccgcggatttctcgaccaggccaccctcgtaatggggcgaggcgtagcgcgcgtagtaccacgaggactcgacgaaggtgtccatggtgtcggtttcacgcttggccggtgcgccgcatttcgggcaagcgcactcgtagaactcgggcatgcgcgccagtggcgaaccggcgccatccggcactacgtcttccggcagcacaaccggcaattggtcttccggcaccggcacgtcaccgcaggtttcgcagtggatgattgggatcgggcagccccagtagcgctggcggctgatgccccagtcacgcaggcggaactgggtgcgcgaggcaccgaggtttttcttgatcagcgcaacttcgatcgcatcgaacgcgccctggaagtccaggccgtcgaattcgccggagttgatcagttcgccgtgctcgccgtacgcgtcttgccacggggccgggttggtgtcacccgagctggtacgcacgaccgacttgatcggcaggctgtacttggtggcgaattcgaaatcgcgctcatcgtgcgccggcacggccattactgcgccatcgccgtagtgcatcagcacgtagttggcgacccataccggcagtttctcgcccgtcagtgggtgctcgacgaacagcccggtcggcaggccctttttctcttgggtggcgacgtcggcttcggccacgctaccgcctttgcattcggcgatgaatgccgaaagctctgggttgttctgtgcggcctgggtggccagcgggtgctcggcggccacagcgacgtaggtcgcgcccatcagggtatccgggcgggtggtgaagactttcagtgcgcccgctgcgccgatcgaatcgacgttgtacggaaactgcacttccatgcctttggatttgccgatccagttgcgctgcatggtcttgacctgttcaggccagcccggcaaatcgtcgaggctcgacaagagttcatccgcgtaggcggtgatcttgaagtagtacatcgggatttcgcgcttttcgatcagcgcgcctgagcgccagccgcgaccgtcgatcacttgctcgttggccagtacggtctggtccagcgggtcccagttcacggtgccgctctttttgtagatcacgcctttttcgaacaggcgagtgaacagccattgttcccagcggtagtaatccggcttgcaggtggtcacttcgcgggaccagtccaccgccaggcccaggctgcgcagctgggtcttcatgtaggcgatgttttcgtaggtccacttggcgggggccacgttgtttttcatcgcggcgttttccgccggcatgccgaaggcatcccaacccatgggttgcaggacgttcttgccgagcatgcgctggtagcgggagatgacgtcgccgatggtgtagttacgcacgtgccccatgtgtagcttgccgctggggtaagggaacatcgataggcagtagtaagtctccttgcctggctgttcactgacttcaaaggacttttgctcgtcccagaaagtttgggcggcattttctatttcacggggctgatattgttcgtgcatggctacttttgaactgaataggggtggcctaatcctcttcggtgcaacgttcaggtccatcgacaccagaaagcggcgcgtccgtgcccaaaccctgcgggaagtggagttacaggaagcgccgtagcatacatgaccccactctatcgagggaaaccctgattgcgcgggcgaggccgtctgtcgcggcaccaggcaggtgcagctacgggggctacgctgtttattggggagtgagtcttatcttcaatgaggtgaggggatggttgaatcgcagcgaactttaacgaaaccgcagttgtacgaaggactgatcgaccgtttgggtcgtgcactggatgcagcaagaaccgcaggccgattgcgtgatgaacggcctctggagctggagttgcgaggcttgagccaggcggagcttgaattgatcaagtgctacctggagttgaatgaccaccgcgcctctcatgggcaggcttccccgccgacccaggagcccttgcgatcggccaaggtaatctggctgaaggacgtttctgcccgccgcggccccgaaaaatttcgggccgtacggtgcaagtgaagcacagcattatccgttggccttctcaaaaggtgctggtaaagattgtcgctaaaccgcgttgcctctaggcttcgggcatctttggagatgcccgatgccttttcgttatttcattaaacaattgctcttgccgcccggcattttcttgctgctgcttgcgcttgcctggtggttccgtcgaagccgtccgcgcctggccgggctttgctttgccgtggggctgggcggtatgtggctgatcagcctgccggtggtggttcaatggggcgcgcatgcactggaaaccgaaccgccgttagcccgtgaagagtgggccactttggcgcagcgggccgatgcgattgtggtgttgggctctggccgtgagcgcggtgacccggcgtggggcacggatcagcccactggcattgggctggagcgccagcgttatgctgcgcggctggccaaggcatccggattgccggtgctgaccagcggtggtttgcactacggcacgccgcccagcgaggccgaactgatggcggtgtcgatgctcgaggacttcggcgtgaccgtgcgctggaaggaagaacgcagtcgtaccacctgggaaaacgcgcagatgagcgccgacattctgttgcctcaaggtatcaagcgtgtggtggtggtgacccaggcctggcatatgccgcgtgcggtgtggagttttgagaaggccggttttaccgtggtgccggggccggttggctttttaggcgtggacaatgcgcggccactgggcggctggatgccggagtttgtgtcggtgtggcgcagtgggcagttgatcaacgaggcggtggggcaggtggggtatcgaatgttttaccggtaagtcgtagcactgaagatcaaatgtgggagctggcttgcctgcgatggcatcacctcggttctactgatacaccgaggtgtttgcatcgcaggcaagccagctcccacatgggttttgtggtgggcggttagacggtcttggccatccgccccgccagcaacgcccagccgaacaacgccaggcacacaatgatcaacggccacgagcgccattgcaggtaaggcgtcaggttgtgcatcggcaccacttcgccatacagaatcccgcgttcgaactgtggaatctgctcggtaatctgcccgaacgggttgatcaacccggtcacgccattgttggtggcgcggatcatccagcggccggcttccagcgcgcgcatctgcgccatctgcaggtgctgcagcgggccgatggagcggccgaaccaggtgtcgttgctgatagtcagcagcaaatcgctctgggccgacaggccggcagcgaactccgggtacaccacttcatagcaaatgaacggtgcaatctggtagcccttggcctgcagcatcgcctggtcggacgggccgcgggcgaagtccgacattggcaagtcgaagaaggcgatcagcccgcgcagcatgtcttgcagcggcacatactcaccaaaaggcaccagcttttgcttgaggtaagtgccttcgccttcgcccaccacggtgatgccgttgaagtagcgcttctggtggtgcacgtcctggcggatcggcacgccggtgatcagtgcggtatgccggtcagcggcgaacttgcccatcatgcccaggtagccctcgacggactccttgagcaccggcacggcggtttccggccataccagcaggtcgacacgcttggaggcaaagctcatgtcacggtacagcgccaactgtgcgttcagttgctcagggtcccacttcatgctttgttcgacgttgccctgcaccgccgccacactcagtggcgggccggacggggaggtccaggcgtgatgcttgagcgccaggccaatcgcccacggcgcaaccagcaacaccagacccgcaccgatgaaagcattacgcttgctcgccaacaggcgcggcaggttgcacagcaccgcagccgtcagtgccagggcaaaggaaatcagccacatcccgcccaatggcgcaaggccggtaagcgggccatcgagctggctgtaaccggaatatagccacgggaaaccggtgaggaaccacccgcgaaacgcttcctggcccacccacaacgccgcgaaggtcagcgcatcggccagcggcgcttcattgcgccgcagccagcgcgcccatagccaggcgggcagggcgaagaacagggcaatcgcagcggtaaatagcagcatcaggaagcccgccagcagcaccgaagcgccgccgaagtggtggatgctgtagtagatccagctggtgccggcgccaaacaggccgaaaccgaagcaccagccacggcccagggcctggcgtggcgtcagctcccgcagcccggcatagaacaatccgacggccaccagcgcaaatggccacagatcgaacggcgccagcgccagggtggtgatggcgccggccaccacggccagcaagttaccgggccagccgggtgcgatcaaacggcgcatttcagtccttaacgggcaataggtgtcaggcgaatcagatgaatccggcggctgtcggcattcaagatgcggaagcgatacgcgccaatttcggtggtttcgttgcgtttcggcaggtggccaaacgcactcatcaccaaaccgccgacggtgtcgaactcatcgtcggagaattcgctgtcgaagaactcgttgaaattctcgatcggcgtcaatgctttcaccaaaaagtcaccgctcggcagtggtttgatgtagctgtcttcttcaacgtcatgctcgtcttcgatgtcgccgacgatctgttccagcacgtcttcgatggtgacaagaccggctacgccgccgtattcgtcgatcacaatggccatgtgattgtggttggcgcggaattcgcgcagcagcacattcaggcgcttggattcaggcacgaaggtggccgggcgcagcaaatccttgatgttgaagttgtcgccgttctctttgaggatcagcggcaacaggtccttggccaacaggacacccatgacgtcgtcatggctttcaccgatcaccgggtagcgcgagtgcgccgagtcgatcacggccgggaggaattcccgaggggtctgggtcgccttgatgctgatcatctgcgagcgcgggaccatgatgtcccgcacttgcaggtcagccacctggatggcgccttcgacgatggccagcgcttcgctgtccagcaacttgttctgatgggcctcgcgcagcagctccagcagctcctggcggtttttcggctcgtgggcaaaagcctgggtcagtttacccagccatgacttctgcccgttgctcgatcggtcttcgctcatagcgattactctaaatcctttgttgtttcagttgagtgttgatcagttttcgtcatctgcataagggtcagggtgacccaattcagcaagcaacgtttgttccagagtttccatttcctcggcttcgtcatcgtctatatggtcgtaacccaagagatgcaagcagccgtggatgactagatgggcccaatgggcctcaagttccttgccttgttcctttgcttcgcgctccaccaccgcgacgcagatcaccagatcgcccagcagcggaatatccagtaactcgtccggtacgtcggcggggaaggacagcacgttggtcgcgtagtccttttggcgccaggtgtgattcagttcacggccttcgggctcgtcgaccaggcgaatggtcagctccgagtcggcggtgcgctggcgcagggccagggcgcaccattgacggaactgttcttcagtaggggcgggcgcttcggtggccagctgcaggtctagctcaagcattgtggcgggcgtccttggacaaaccatcgtcacggtgttcgaagcgctcgtaggcttcgacaatgcgctgcaccaacgggtggcgcaccacgtccttgggcgagaagtgcgtgaaactgatgcctggcacgtccttgagcacttcaatcacatggctcaaacccgacttggtgcccttgggcaggtcaacctgggtaatgtcgccagtgataatagccgtggagccgaagccgatgcgggtcaggaacatcttcatctgctcgaccgtggtgttctggctttcgtcgaggatgatgaaactgttgctcaaggtgcggccgcgcatgtaggccagcggggcgatctcgatcacctggcgctcgatcagcttggccacgtactcaaagccaagcatctcgtaaagcgcgtcgtagagtgggcgcaggtacgggtcgatcttctgggcgaggtcgccgggcaggaagccgagcttttcgcccgcttcgaccgccgggcgcaccagcaggatgcggcgcacttgctcgcgctccagggcgtccactgcacaggccacggccaggtaggtcttgccggtaccggcggggccgatgccgaaattgatatcgttaccgaggattgccttgacgtacttctgctgattcaagccttttgggcgaatcatgccttttttggtacgcagggccacgctggcttcggccacagggttgttggccaggtcttccaccgccgattcctgcaaatacaggtgcacggtttccggcgacagctcgctacccttggtttcgcggtagagacggcgcagcaggttttctgccgattttgtgggctgggtttcaccgatgagctcgaactgattgccgcggttgcggatctcgatgcccaggcgttgttcgatcaggcgcaggtgctcgtcgaactgtccgcacaggttggcgaaacggcgagcctcaaacggctcgaggataaaacgatggggttctgcgatgggtgcgttcaaggtcgcttttagccgccctttggctgttgaggtgaaagagaggataacgccagccgctggactgcgaaagcacttatataaggcggccgcttgctgcgcagcaatgaagatccactgtgggagctggcttgcctgcgatagcggtgtatcagtgccagttgagttaactggcccgccgctatcgcaggcaagccagctcccacattttgatcttcatttgtttacagggattggttgatcagcgagccgcgcagcgagtgcggttgggccgcatcgatgtgcacatcggcaaactgaccgatcagcgtcggattatcgcagcggaaattgacgattcggttgttctcggtacggccttgcagctcgcccgggtcttttttcgaataatcggtgaccagaatgcgctgaatcgaaccgaccatttgtcggctgatttcgaacccttgctgattcaagcgatgttgcagcgcgttcaagcgttcttttttcagcgcttccggggtctcgtccaccagatcagcggcgggcgtgcccgggcgctggctataaacaaaggaatacgagaagtcgaaaccgacgtcttcgatcagcttcatcgtctgctcgaaatctttctcggtttcgcccgggaagccgacgataaagtccgaactgatgcaaatgcccggcaccgccgcacgcagcttgcgcagcttggatttgtactccagggccgtgtggttgcgtttcatcgccgaaaggatccggtccgagcccgactgcaccggcaagtgcaggtgtttgaccagctccggcacttcagcgtgggcctggatcaggctgtcggaaaactccagcgggtgcgacgtggtgtaacgaatgcgctcgataccgtccactgcagccaccacgcggatcagctctgccaggtccgccaggcggccgtcttcggtctggccgcgatagccgttgacgttctggcccagcagagtgacctcgcgcacgccgttttcggccaagtggatgatttccgccagcacgtcatcaaacggccggctgacttcttcaccccgggtgtaaggcaccacgcagaaggtgcagtacttgctgcagccttccatcaccgacacataagcgcttggcccgtcgatgcgcggctctggcaagtggtcgaatttttcgatttccgggaacgagacgtcaacctgcggcagcttggtgatgcgcgcagcgtcaatcatttccggcagacggtgcagggtttgcgggccgaagaccacatcgacatagggcgcgcggtcgcggatggcggcgccttcctggctggccacgcacccgccgacggcgatcaccatgtccgggttggccagtttcaactcacgccagcggcccagctgggagtacacacggtcctgggcccgttcgcggatcgagcaggtattgagcaggatcacgtcggcatcttcggcgcgggcggtgacttccagggcctggtgttcgcccagcaagtcgaccatgcgcgagctgtcgtactcgttcatctggcaaccgtgggtttcgatataaagcttcttggccatgggaatcgtcaactggtggtaaagaaccgcgcattatagggggcatgcccattggttcctagcgttgtgcatcgggtgccatgctatagttcgcgccctcttttatatccccgatgtgttatccgcccaccatgaccaaacgcgaagctccaatctacaaggtgattttcctcaaccagggccaggtgttcgaaatgtacgccaagcagatctatcaaagtgatctgtggggcttcctggaagtggaagagttcgtctttggcgagcgcacccaactggtcgtggacccgggcgaggaaaaactcaaggctcagttcgaaggcgtggtgcgcagttttgtgccgatgcattcgatcgtgcgcatcgacgaagtggaacgcttgggcacgccgaaaatcagcgaggcgcgtggcaccagcaatgtaatgccgtttcccatgccaatgcccgagaagtagggctcaagagcctgtggtaagagggcttttgtggtgagagggcttgccccgcgctgggtggcgaaaccacgccaaaccagccgcttaaatttacctgaaacaccgcagcggtccgattggggcggcttcgccacccagcgcggggcaagcccgctcactacaggtcccgcgggatcaggggaggggcgagaaaggcgaacgcccatcggcactctgcaattcctgcaaataattgcggaaaatctgccccagcacttgggtcgccacttccagctcatcacgctgcatgtgctcggccacttcgtcggccgtgtccagcgcgtcttcagcaccattcaccgccgccattttcagcacgatgtacgcctgcacgttgttggccggcacgccttcgcctttgaagaacatgttgcccagctggaattgtgcctgggcgtggccctgcaacgaggctttctcgaaatagctcaaggcttggttgaggtcgcgggcggggtttttgctgtcgtggaagtactcacccaactcgtattgcgcctgcgcatccccgccgtcggcctgtttctggcacgcgctcagggcttcggcctggctgtctggctgggtattgagggtgcaacgacccatcgctgggattaacaacgagttgccgcctgcttgtgcatgtgccagcagcggctgaaggagcaacaggcagcccagaaccagggtgcggccggtgcgtttcatgggaatcgacttacctctgacggggcacgcggaccctcggggagtccaataagcgcgcattatgaaataagcaggcctctgcttacaaagtctttactcgtttttctgctgcatgggcaagttatctgccggattgcaggtgatttctcgaaaaatgcaggaaatatctgtaagcaaagtagcaaattctgacgccgccaagggcagcgtcagaatcagtgccccttatttcagggccgcgaaggcccgctcggcagcatccagggtcagtttcagctcggcttcgccatgggcgatcgaggtaaacccggcttcgaacgcgctgggtgccaggtacacgccgccttccagcatcaggtggaagaagcgcttgaacagatcggcatcgctgcccatcacgtcatcaaaggtaacgatatcgtcggcgccgctgaagtacaggccgaacatgccgcccgcttgagtggtgacaaacggaatccccgcagcatcggcgcgttgttgcaggccgtcgagcaggcgggtggtgtagtcagtcagctcggcgtgaaagcccgggcggctgatcaggcgcagggtggtcaggccggcggccatggccaacgggttacccgacaaggtacctgcctggtacaccgggcccagcggcgcgatgtgctgcatgatttcgcgcttgccgccaaagcagcccaccggcatgccaccgccgatgatcttgccgaatgtgctcaggtccggcgtgacgccgtagtgagcctgagcgccgccgagggcgacgcggaagccggtcatcacttcgtcgaaaatcagcactacgccgtgcttgtcgcactgctcgcgcaggccttcaagaaagcccggtgccggtggcacgcagttcatgttgcccgctaccggttcgacgatgatgcatgccacctcctggcccacttcattgagcatctgctcgacggcagagatgtcgttgaatggcagggtcagggtgtgtttggcaaaggctgccggtacaccggccgagcttggcacgccttgggtcaacgcaccggaaccggctttcaccagcaggctgtcggagtggccgtggtagcagccttcgaatttgatgatgctgtcgcggccagtgaagccacgggccaggcggatcgcactcatggtggcttcggtgccggagctgaccatgcgcaccatttccatcgatggcacgatcgagcagaccaggtcggccatctcggtttccatggcggtcggtgcgccataggacaagccgtgctgcaattgctggcgcacggcgtccagcacgtccgggtggctgtggccgaggatcatcgggccccaggaacctacgtagtccacataacgtttgtcatcttcatcggtgacgtaggcgccttcggcatgcttgaagaacagcggcgtgccgcccacgctcttgaatgcacgcacgggggagttcacaccgccggggatgtgtttctgggcattggcaaacagtgtttcggaacgggacatggcggggctctcttaaatcaaatcttgagtagggcgttgaacgcgcgggcgcggcgcgtgacttcctgggtgctgtcggcaccgaacaggccgtgcaccacggcgagcaggtcggcgccgtgggccaccagcggttcagcgttttccagggtcacgccgccgatcacgcagatgggcaactgcaatcgtgtgcgggcttcagccagcatgtcgaccgtggcggcgggtgcgccgggcttggtattggaattgaagaagcggccgaaggcgacatagctggcgccttctttggcggcctgctcggccagttcgatctggctgtggcaggtggcgccgatgatggccttggagccgaggagtgcacgggccggggtcagtgggccatcggtctggcccaggtgcacgccgacgcccaggcgtgcggccagttcggcgtcatcattgatgatcaactgagtcttgtagcgcgagcacagctcgcgcagcttttcggcttcacgcaggcggcgggcctcgtcgctgcttttgtcgcggtattgcagcagggtcacgccgccgtccagcgccgcttcgacgtaggcgagaaatttgccggccagcagttggctgtcggtgatggcgtaaaggccacgtagtttcatcgggcaagccccttgctgttgaaggcagacagtgactaaaggcaaacggttacgagcagaaatccagcggcaaacggcgcggcacgaactggccctggccgagctgttcggcgtcacgcagggtgcgccacgtgtagttgagcgccgtttgcacggcgctcaccaacccttcgccttgagcgatgcggccagccagcgcactggccagcgtgcagcccgaaccatgatagctgcccggcaagcgctgacaggtgaaggtctgctgcgtgccgtcgcggctgtacaggcggttgtgcacttcatgctcgtcgccatggccgccggtgatcaacaggtgtttgataaacggcaatagcttttcggcgcattcgtccgccgtaccttgcggcaactcggcgaggatgcgtgcttccggcaagttgggcgtggcaatcagcgacaacggcagcagccgctcgcgcatggcgtagccgacttcatccttgcccaggctgccaccgccgccggcacgcagtaccgggtcgcacaccaccggcaggtgcgggtgcgcctgcagcagttcgaccacggtgtcgaccatcgcggtggagccgagcatgcccagcttgaccgccgcgacttcggaatcaccgagcaccgcattggcctgggccagtacccactcacggtcgagtacgcggaaatcgctgacattgacggtgttctgcacggtcagggcggtgacggccggggccgcatgacagccttgggcgagcagagcttcgatatctgcctgcaagccggcgccaccacttgggtcgtggccggagagacagaggacaacggggcgagagctgtagatattcatggtgcgcgagcttaccaccaaacgcttttggcgtggctgcctggctcgaggggaattttgtgcgtggaaagggccggtttggcaggttttttttgcgcgaattagcgcggagaaaatcgctgaaagtgccgtgctagagcctctggaaaatttatttcaatggtgtctaatggcctgtaccggctatgctagagtggatccaaacaacttactgtatcgccggtatacgtcatctcaaaaggaatggggggcttttggcataaccggacaggccacgctggggctctatgcgctatttgctgatcttaatattgtgcgggctgccgatgctcgccagcgccatcgagtttgatcagagcactcgaagcctgccgttgggccgtgtcatgcaggtgctcgaagaccccaccgacgccctgaccatcggcgacgtcagctccccggcctatgcgggccagttcaagacccacgacaaagccacccttaacgccggttattcacgctcggtgttctggctcaaggtcgacctgcattacgtcgccaaagacccgcgcgcgccacgcacctggttcctggagctggcctacccgccgctgaaccgcctggacctctaccagcgcgacaacgccggcaactatcgcctgaccacccgcaccggcagcaccttgccgttctccagccgtgaagtgcgccagagcaactacctgttcaagctcaacttcgtgcccgaccagcaggaaaccgtgtacctgcgcctgcagagcgaaggctcgatccaggctccgctgaccctctgggccggtacggcgtatctcgaagaacagccgctgcgcctctacgtattgggcgcgatctatggcgtgctgctggggatgctgatctacaacctgttcatttacctgagcgtgcgcgacaccagctacctctattacatcctctatatcgcttcgttcgggttgtatcagctgtcggtcaacggtgtggcggttgagcacttctggccgaacaacccctggtgggcgaatgcggcggtgcctttcctgatcggctcggcggcgctgtttggcagcctgtttgcgcgcagcttcctgcacaccgcgcaacacagccgctggctggaccggatcctgctggggttggcagcctgcggtgcgctggtgatggtgctggcgctgctgaccagctacgccgtggcgttgcgcctggccactggtttggcgctggtgtttaccgtgaccatcttcgtcgccgccatcaaagcctggtattgcgggcagcgcatggcgcgctatttcatcatcgcctggtccgcgttcctgctcggcggggtggtcaacacgatgatgttgctgggttacctgcccaatatgttcctcaccatgtacgccagccagcttggctcggccattgaagtggcgctgttgtccctggccctggccgaccgcatcaacggcatgcgtgagcagcaggcacagattctgttcgacgccagccagaagctcgaggtgctcaaccagcaactggcccgcagcaaccggctcaaggacgagttcctcgccaccctgacccacgaactgcgcacgccgatgaatggcgtgatcggctccctcgagttgatgcagaccgtgccgctggacgacgacctggcgcagtatcagcaaacggccgccggctcggcgcgggacatgatgcgcatggtcaacggcatcctcaccctcaccgaattgcaagccgggcgcctcagcgcgcagcccgaagtgttcagcctgcgtggcaccctcgatgcgctgcgccagcaattcagcaccagcgcccagagcaagcgcctggcattttccatcgacgtggcggacgaactgccggaccggttgatcggtgacgccggcaaactcagccaatgcctggattgcctgctcgacaatgcattcaagttcacccatgccggtgcggtgcgcctgcgcgtggtcggtgtgccccacagcgatggctcgctgcgcctgagcttcattgtgacggacaccggtattggcttcgccttccttgacgaggccacgttgtaccaacgtttcttccaggtcgatggctcgatgacccgtgagtacggcggcctgggcatcggcctggcgatttgccggcagttgatcgaattgctcggcgggcgcctgacccaccattccgagttgcgtaaaggcagccgcttccagttggaagtcagtgtgaacatggcgccctcagcgcccaaacaagcgcccgataaacagcgctcgccccaggaatgcgcggtgctgctggtggacgacaacagcgtgggccagttagcggtacgcggcatgctgctcaagctcggctaccgggtcaaaaccgtggacaccgctccgtccgccttggcggccttgcagggtgaagcttttgatgccgtgctgctggacgtgcctgaaggcggtttttcattgtgctgccagatccgtgcattgcccggctgcggtgaattgccggtgatcgccctgagcacttccttgcaggcgcctgaccgagagcgctgccacggtgtgggcgtgaccgatcgtctggccaagccggtacgtttcgaagcattgcaggcagtgctggagcgccgattgttgcatgcagtagagggtgaaagcgccgagcattcggcgcgtatgccacttttttaagccggttgacggtgcttaactgaaatccaggcctcaccgcacgtggcctttttttccaggaggcccgtcatgaacctgcatcagtttgccgaaacccacgacgtcaccaaccagccgccgtccctggatggcaacaacctgtaccgcatcgacctgcccctgcaagactggtcacgccgtttcggcgccggctgggcgcaggggcgcatggatgcttacggcgcgctggccggtggcccgttgatggcggccgggttcctggcgaatgaaaacaaacccgtgttcagcagccatgaccgatatgggcatcgcatcgacctggtggcgtttcaccccgcctaccatgagttgatgcgcaccgccgtcgaacacgggctgccatccctgccgtgggcccacccgcagcccggcgcccacgtggcccgcgccgccatgacctacctgcacagccaggccgaagccggcaccggttgcccgttgaccatgaccttcgcttgcgtgccggcgctgcgtttgcagccggacctggcggacctctggctgccgaaaatccttagcactgaatacgacccacgcaacgtcggcatcgcccacaaggccggcgccactatcggcatggccatgaccgagaagcagggcggcaccgacgtgcgtgccaacactacccgcgcttacccggtgggcgcaggcggcccggggcaagcctatgaactggtgggccacaagtggttctgctcggcgccgatgtgcgatgcgttcctgaccctggcccagaccgaaaaaggccttacctgtttcctgctgccaaggcaccgcccggatgacacccgcaacgagttttacatccagcgccttaaaaacaaactcggtaactgctccaacgcttccagcgaagtggagtttcgcggcgccctggcctggatgatcggtgaagaaggccgtggcgtgccgaccattatcgagatggttgccatgacccgtttcgactgcatggtcggctccagtgccctgatgcggcaggcgctgacccaggccagccatcattgcgcccatcgttcggtgggagggcgtgtgctcagtgagcaaccgctgatgcaaaacgtgctggccgacctggccctggaaagcgaagccgcgctggcgttgagcatgcgcatgggccgcgcgctggatcatctggagggtgaacaggaagccaagttcgcccggttggtgacggcagtgggcaagtattggatctgcaaacgcgcgccggcgatgatcaacgaagccgccgagtgcatgggcggcgccggttatgtcgaggacagcatcctgccgcgcctgtaccgtgaggcgccggtgaattcgacgtgggaaggttccggcaacgtgcagtgcctggacgtgctgcgcgcgctgtcgaaagagccgggcgtgctggaggcgttgtttgtcgagctgggggatgggcatggcgacaggcaactggcgcggcatattgaacagctgaagtctgcgtttatggacactcaggacatccagtaccgtgcgcggcagttgactgaagacattgccgtggcgctgcaggccaagctgttgctggaggcgggcaatgcggcggtgagtgatgggtttattgccagccggttgggcgagtcgtccggccgggtgtatggcaccttgccgcgtggggttgatgtagaagccatcgtcgcccgctcaacacccaccctctgactgcgctcggtcaaaaatgtgggagctggcttgcctgcgatagcggtccatcagtcacatcattgctgactgacccgccgccatcgcaggcaagccagctcccacagcaattgcagttaacttgaatgggcactccaattcaaagtttgcgtctgacagggatacaggcaagataaaggcctgcacgtcagaacacaggatgcttaccgtgaccgaagcttttgttgttgtcaaaaccgccgaagaagccgtggatcggctggcggctctgcatgagcgtgccaccggcgcacttaaccaagccctcaagcaatacctcaaggaccgcgtcgaacccgacgccgaacaacgtgcgctgtttcgctacccggaactgcgcctgacttaccactgccacggcgaagttccacaaactacccgggcgtatgccaaagttcagttgccggggacctacagcgtcaccgtcacccatcccgccgccttccgtaaatatttgctggagcaactggtgccgctgatgcacgacttcaccgtgacggtggaagtgggcgtcagccaccagaacattccttacccgtacgtggtggagcagggcgacgaactggccgggtccggcgtgaccgctgcgaccctggcccgcgtatttcccagcactgacttgtcagccgcgaccgatggcatcgccgacggcctttatgattgggaaaacaccgacccgctgccgctggcgctgttcgatgcggcccgcgtggacttttccctgcgccgcctggtgcactacaccggcagcgactggcgccatgtgcaaccgtggatcctgctgaccaactaccaccgctacgttgaccagttcatcgtgcatggcctggagcaactgcgcagcgacccgcgttttatccgcatggtgctgccgggcaacgtggtaatcgacaagagcatggaccacggcgaagcgtcggccatcgccgcaggcgtggtctggcaccgctatcagatgccggcctatcacctgcaggcggctgacggccacggcgtgaccctggtgaacatcggcgtcggcccgtccaacgccaagaacatcaccgaccacctggccgtgctgcgcccgcattgctggctgatgattggccactgcggcggcctgcgccaatcccagaccatcggcgattacgtactggcccacgcctacatgcgccgcgacgggattcttgaccgcgtagtgcccccgaacatcccgatcccggcgctggccgaagtgcagatggccttgcagcaggcggcggccaacgtcaccggcgagaaaggcgaagagctgaaaaagcgcctgcgcaccggcaccgtgttgacctacgacgaccgcaactgggaactgcgttgggcccaggaacgaccgctgatcaacctgtcccgcgccgtggccgtggacatggaaagcggcaccattgccgcccagggttatcgcttgcgcgtaccgtacggcacgctgctgtgtgtgtcggacaagccgctgcacagcgagatcaagctgcccggctcggccaacgcgttctatgagcgtgcggtgagccagcacttgaagatcggcatcgaagcggtagatttgttgcgcaccgagctcaactcgctgcactcgcgcaaactgcgcagcttcgacgagccgccgttccgctaagcggttgggatggtcatttagcggtcaggccactagcattgtcggtcctgaccgttagatgttcctttgccatgtcccgtcccacccgtcccgattcccgccgccccggtgtgaaacctgcgcagtcctccgcccgtcgtgtcgccaaggcaccgccggccgagccgaagctcgtcctgttcaataaacccttcgacgtgttgacccagttcagcgacgaaggcggccgcgcgaccctcaaggattttatcgacatccccggcatttacccggcgggccgcctggaccgtgacagcgaaggtctgttgctgctcaccaatgacggccaattgcaggcgcgcattgccgaccccaagcacaagctggcgaagacttattgggtgcaagtggaaggcgagccgaccgaagaacagctgcaacgcttgcgtgacggtgtggagttgaacgacggcaagaccttgcccgcccaagcgcggcaactggatgagcctgcgctatggccacgcaacccgcccgtgcgctttcgcaaaagcgtgcccacgcactggctggaattggtgattcgtgaagggcgtaaccgccaggtacggcgcatgacggcagcagtggggttgccgaccctgcgcctggtgcgcgtgcgaattggcgagtggtcaatcgacggcctggaccaaggccaatggaaggaagtgccggcgcgcttataaagcgccggactcgatcaggccgatcaccacgcttttgataatgaacgcagccacgcccagccccagcacgaaaaacaggatgaaggagccaaagcgcccggccttggatttcttcgccaggtcccagacgataaagcccatgaaaatgatcagaatggtgaccaggccagtcatcatccattcttcaaacagggcggggtcgatggaattcatatggtcttttccggcgcaggagaggctgagtataaggcagtggcagcgacctggaattgacctgcgtcggtcagtcgcacacggcgctgcagcaaaaatgtgaaaaccgtggaataaaaaagcctgtggccctgttttattgaagtcattaaaacagtgccgtgcgcagcgttgaacgctattgagtcggcccatcgcgtcaacttcaatgttcgttggatgcaaggcacgccataggagcacaacccaatgtggcacctgaataaagtcaccgcgtcgtttaccgcccatcttccccgcgcggcacagaacaacttcgataccttccagaatgcgattcataacttgggtatccacccaagggacgcggcgcaaatgctcggcagcgccgattacaaaaggttaggcacctcggaccagtaccaaattcgcctgtccggttccgaacgtgcgaccttcctggtggatacggccacccgtacggtgaccattttgcaggtgggcgggcatacgtagccttgcataaacacatcgccgacatgcgcgctcgtgcgtttggtcaggtgcgcaggtgcgtcaacggcaactcggtgctgttgagcacctggttcagcacaaagctggagcgcacgctggtcacgccttcgatgcgggtcaggtgccccagcagcagtttctggtagtggtccatgtccggcaccaccactttgagctgatagtcagcgtccatcccggtcaccaggctgcattcgagcacttggggcagggtgcggatggcggcttcgaagttctcgaaacgctcgggggtgtggcggtccataccgatcagcacgtaagccgtcaggctcaggcccagcatcttgcggtcgagcagcgcgacctggcgcgcaatgtagccgtcgtcttccaactgcttgacccggcgcgagcagggcgacggcgacaggccgatgcgctcggccaactcctggttggagatcctcgcgtcgcgctgcaattccgccaaaatactcaggtcgtatcggtcaagcttgctcattgggttggcctttgtcgtaactattgcggtgaattatccatgaagggttaaaaattgcgcaagcactgtttattgacgcaatcttcgcaatcatctgtcgggcgctggcgggtatctttattaacagaatcaccgcctggacaaacagtccactgcagctcgcccaatcaggccggctgcggccgccgccccagcagggttgagccggcctccaggctgcacactgtccacaagacggcgtgaggtgagccaacgtcaaaagcgttgagcacggacgaaattctcaaggggtggccgacgggtcgcccctttttctttgccttcagaaaattgttctcgtgactgataacctgtctcagaaccgggtgaggcttttccagtctcatactgtgaggccggacattccaggcccaaacccgcagtgaggaatagcatgaagcgcatctggcgtatggccggtgtaggtttgctgatgatcagcgtcggcacgcaagtgatggccgacgacccgcgctctgaaggcggtggtcagcgtgatcgtgggcctgaaggcgggcggcaaggtaatgaacagccgcgcccgcaaaacaatcaaccacgccctgacaacaatcgcccgcagaatcaacatttcgagcgtgccgagcagcagggccatgggcagtggcaagggcgccctcagggcgacgggcagccccggcctgcgccgcagcagccggcgaataacctgccgatccagggccgcccggacacggttcgccagacccaggaaccacgccagggttattaccgcgacatcccgcgacgcaacgacgacaacccgcattggcaagccggcaacggcccaggcccgcgcccgggtggcggtttcaataatggccaccccaatgacacgcgctggccaggccgccccgatgggcatggcaatggctggggccccggcccgcagcatcgccccgggtatatcgtcgaccgttttcccgaccgcaattaccgcgtgccctaccgtggccaggattacttcttctcaggcggttactggtatcgcccgcaaggcccacgctacgtcgtcgtgacgccgccgtacggtatccgcgtgcaatacctgccggactacgcgcgggaagtgtgggtcggcagcgcgctgttcttcgtcgcagccggcgcctattacacctacgaaagcacttcccagcagtacgtggtggtgcaaccgccggcggaggcgccagcgcccgcgccgcagagcaatggctatgatgtggtcgcctatcccgccaacggccagtcaccggcccaggtgcagcaggacggctatgactgttatcgctgggcggtgcagcaaagtggtttcgacccccgcaccgtcacctacgccccggaccctgcggtggtgcaaacctaccgccaggcccagggcaactgcctgagcagccgcgggtaccaggtgcagtactaggttttgttgcccgtgaccacttcccgcgggtcggcgtgcaccagcacttcggcgcgcgggtaagcctggtgaatggcatcggcggcttggtcgctgatgccgtgggcgactgacagtgacaactcccccggcaattccaggtgcagttgcacaaaccagtggctgccggagatccgtgtacgcaaatcatgtgcacccaacacccccggcaccccgcgcgccagttccagcatgtgctggctgacgtccggcggcagttcctcgtccatcagcaccgcaaagctttcccgggcgatctggatcgcgctccacaaaatgtaggcggcgatgcccaagccgaaccaggcgtctacctggttgtagccgaaacccgccagtaccagggccaccagaatgctgccgttgagcatcaagtccgagcggtaatgcaacgagtccgcgcgtaccgcgttggagccggtttcacggatcacccggtgttgcaggatcaacagcgccactgtcagtaccagcgaaaacacaatcacgccgatgctcagccacggcgcgcccacgggctccgggtgctgcaagcgctgatacgcctgaaaagcgatcaacaccgcactgcccgcaataaacagcgcctgggccatgcccgacagcgactcggctttgccatgcccataacggtggtcgtcgtcggccgggcgcagcgcgtagtgcaccgccagcaaattcagcagcgaggtcacgccgtcgagcagcgagtcggtcaacccggcgagcatgctcaccgagccgctgaaccaccaggcgatggctttggtgacaatcagcacgcacgccacacccaccgacgcgcgggtggccaggcgcaatagcctggcgtgttcgggactgctggtcatgggcggtccttaagcagcgggtttcaggcctagcgacgcaagctgttgcacgctgcccttgaactggatcaggcgcgggtcgtccagcggcaaggtgcggccggtttctttctggatgatggtttgcagcttggcgttgtcgaccttgccgtcagcgccgatcgcttcgtggagtttctccggggcgacttgggcggttttgcccggttcgaagtagatggcgccggtggcgaagtccacgccgaacgcgatcaggcccgggatcacatagaacagcaggcccacggcgtcgagcacggcgatggtcgggtcgatcttgccgtcgatctggccacggcggtcggggtagaaaatcgaaccgcaggccgtcaattggctcagcaaggtgacggcgaggacaccgccgatgacacgggaagcgatacgcatgaagactctcctgaacactgttaatacgaaactataagccagatcgactgagcgacgaagatccaatgtgggagctggcttgcctgcgatagcggtgggtcagcctgccaatatggcactgatacaccgctatcgcaggcaagccagctcccacatttaaccgtgttgcaaagtcaatcgggtggtgtttttgacaccaccaccggcatccagccgttcgccgttatactcgccgctctgctttggagccagtatgaattcgttgccgattgatgatgttttacccgccctgcgtgacgccttggcgaatcgccatgaagccgtgctggaagcgccgcccggcgccggtaaaaccacccgcgtgcccctcgcgctgttgaatgaggcgtggctggcggggcaaaccatcctgatgctcgaaccccgccgccttgccgcacgtgccgcggccgaacggctggccagcgagctgggggaaaaggtcggcgaaaccgtcggctaccgcattcgcctcgacagcaaagtcggccccaacacccgcattgaagtggtcaccgaaggcatcctcacccgccgcttgcaggacgacccggcgctggacggcgtgggcttgctgatcttcgatgagttccacgaacgcagcctcgacgccgacctcgcacttgccttgagcctcaatggtcgcgacttgtttcgtgacgagcagccgctgaaaatcctgctgatgtccgccaccctcgaaggcgaacgcctgtctgaattgctgaacgacgcgccgatcctgcgcagcgaagggcgcatgttcccggtgcagatgcgctggggcaggccgtatcaagccggtgaatttatcgagccgcgtgtggtgcagaccatcctcgaagccgtgcatgacgagaccggtagcattctggtgtttctgccggggcaggcggagattcgccgggtcaaccagcaactggccgaggccctaggcgagcgccccgatgtgctgctgtgcccgttgcatggcgagctggacctcaacgcccaacgcgccgccattgatccggcgcccgccggcaagcgcaaagtggtgctcgccaccaacattgccgagaccagcctgaccatcaacggcgtgcgcgtggtgatcgacgccgggctggcgcgggtgccgcgtttcgaccccggcagcggcatgacccgcctcgacacccaacggatttcccgcgccagcgccacccagcgtgccgggcgggcagggcgcctggaaccgggcgtgtgttatcgcctgtggtccgaggaccagcacgagggcctggccgcctacagcagtgcggagattctcgcggccgacctcgcgggcctggccttgcagctgtcgcgctggggcgtcacgcccacgcagttagtctggctggatgtgccgccgaccgccgcgtacgcccaggcccaggatttgctggtgcgcctcggtgccttgaatgaagacacgctgaccgcccacggccagaagatggccgagttgccggctcacccgcgtatcgcccatttgttgttgcgcgggcaggatttggggttggcggcgacggcctgtgatgtcgcggccttgttgggcgagcgcgatatcttgcgcggtggcggtgcggatctgcacagccggttggcgttgctcagtggcgaagagcgcgcacgcggcactcaaggcggcgtgcagcgcgccaggcaactggcccggcaatatcgcggctatttaagaggcaacgcgacgcagccggtcgccgaccccgaccacccgcgctggctaggcgccttgctggcgctggcctacccggaccgcgtcgcccagcaacgccgccccggtggcgccgaataccgcctggccaatggccgcgccgcgttgttcgccgaggctgacagcctgatgaaacaagcctggctggtgatcgccgaccttggcagccgtcagggccagcgcgaagaacgcatctacctcgccgcggattttgatccggcgctgtttgacacggtgctcgccgagcaagtgcgcaatgtcgaccagttggactgggacgagcgcgaaggcgtattgcgcgccgaacgccagcgcaaggtgggcgaactggtgctcagccgcgaacccctgaccggcctcgatgaagccgcgcgtagccaggcgctggtcaacctggtgcgccgcaaaggcctggagctgctgccgtggacgcccgagctgcgccaatggcaagcccgcgttatgctgctgcgccaactggacgccggtaaaaccagcgaatggccggacctcagcgacagcgccttgctcgctagccttgaacactggttgatgccgtacctgggcaaagtctcgcggctcagccatttttccaacctggatatctccagtttcctgcacaacctgctgccatggccgctgccccagcgcctggatgagctggcgccgcagcatgtgaaagtgccgtcgggctcgtcggtgcgcctggattacagcgaacagccgccgattctggcggtgcgcttgcaagaattgttcgggctggcggacacgccgcgcattgccggtgggcgccaagtggtcaagttgcacctgctgtccccggcgcgcaggccggtgcaggtgacgcaggatttggcgaacttctggcgcagtacgtacgccgaggtgaagaaggatttgaagggaaggtacccgaagcattactggccggatgatcctttagttgccgaagcaaccgcccggatcaaaccccgtaaatagccacaatgccgatcaactgtgggagcaggcaagccagctcccacaggggttctgttgtgtttgttattgcgcggcgggtaacaggaaccgcgcaatcacgggcaagtgattggaaatgcgcaacgtatcttcctggcgcaccttggcctccacccgcttgatcctagggctgtaaaacaggtaatccaatgtacgatccggcccctccacgcgcgggtcattcgggaagtgcgtcagccatttcttacgatcaataccgctggattcactgttactcggaatcatcgggtacttgtcccacaacaaatgcagttcactgtccggcgaatactgcccgcgtttgccggcatccaggcgcaggaattgccccaacggcagcaggttgaaatccccgccaatcagccacggcgtgccccggccttcgaatttatccatcaactttaccgtagctttcacctgttcctgcacggcggtgcgcccaggtacgtcgccatccaggcgcgtgttgagcaccgccagttggccgccgtcacttaaaggcaggtaggtcagcagcaaggcgggtttgggttggaactgacggctgatgaaattcgccgggggcaccggcagttgcaagcgttctgcgtgttcgatctggtagcggctcagggtcacgagcttgcggccgacgctgccgaaaatatgcaggttgggcacaaagtcggctttccagtcgaacgcctgagcgctgcacgggtagaggtcgaccagacgttcctgaagcagtgcgacctggtcctggtagtgggacgctttggcgccttcgtcgagctcctgcaacagcaggatgtcgggctgttcgtcgcgaatcacccgcgccacttcgtcgaggctgaaagccatgtcctccacggtcggcaggtcgtcggggccgctgccgtcggtggtgtcgtaccagaacacatagttcttgccggccaggtattgcacattccaggtcatgaccttgagcgcctgccccggcagcagggtcggcgcacgcggcgcgacgcagctcacgggcaggatctgcttgtcgtcagggcgccaggtcaggctgtagatcaaggccgtgagcacgcctgcaagaatcaacaggctcaacacggttatgcgcaataaacgggtcatcggctcggcttatagctttttggaggtgccacggagcatatcaccgcgcgtcggcatcgccaccgatcagcatgaataaacggaacaagaccacgctggtgaacagttgcaggaagctgtgggcgctgtcgatcagcacacccagcaacggcgccggatttggataggccgcaacgctggcgcctttaagcagccacaacggcgtcatcacgcacagcaggcataccaggattcgccagaaatgcccgcgagtcaggcggaaactctccttcatcgcctccagcgccggcatgccgcgcagcaccagcaggtactcggcaaacgccagcaccaccatcagccacaggcccggcaggaaatacagcgacaggccaagcagaatcaacagcgtgctcagggccgtcagcagggcgaaacgcggccacagggtcagggccgtcgcccataagtccttggtgttcggcgactcgccacgggtgcgcgcatccagaaacagaatcagcgcgccggtgtacagcgggtacaccaacaggccgaccactacgctgtaaccggggaaggcatccgggcccagcgtgtggtcgagcacctgttgcagcagggcttctaggatcaccagcggcaggcagagctggacgatggcgcccaggttgcctcgggtaaaacgaaaggagtcgcgcagtacatctaacggattcatcaggttcatcacaggccgaaaagcaaggacgacactttaaccgatcatgaagaaaggtgagcaaacgtaaaccttgcgtaaaggctattgaaacgtctggtaacagccccataactagcctgtagccctcctgaactcaggcgggcccatgatttctaccggcaatctaacgaggtcgccatgaacagcgaagagcaaaccctgatcgatggactgttttcacggttgcaacaagccgaaacggactcagccccccgcgacgccctggccgaagcgcggatcaaggagcacctgacacgccaaccggctgccgggtactacatgacccagtcgattttggtgcaggaacacgcgatcaagagcctcgacgcgcagaacaaacagcaggcacagcagatccagcaattgcaggatgaactgcaacaagccaaggctcaggccgcgcaaccggcgccgagcagcggtggtttcctgtcgagcatctttggtggcggcagcagccgcgattcgcagcctgcacaaagtgctccgccgtcctccggcggctggcgtgaaccggcgcggcctcagtttggccagccagcaccgcagcaaaactacggtgccccgcaacagaattaccaacagccacagcaagcgcctgccgccccgatcggcagcggcttcctcggtggcgcgctgaaaaccgccgctggcgtggccggtggtgtgatgctggccgaaggcatcagcagcctgttcaaccacaactcgcaacagccgcaagtggtggaagaaatcatccgtgaagagccggcgcccgccagtgaccaaggcggttggggcaacgatgaccagcgttttgccggcggcaatgacagctggggcaacgacagctcctcggacagcttcgccgacaatgattattccgacgactcctcctcgttcggcgacgacgattccttcgtctgacacccccaaagcccggtgcgctttgtcgccccgggctgatttttcgctgaaactttcccatggctggcatactggcaacctttccgggcgctggcgcctggctgtcatgaggaagtgcggtgaagaaaattgcggtgttcgccgatgtacaaaacctctattacaccgtgcgccaggcgtatggctgccacttcaactacgccgccctgtgggctgacatcagcgcgcgcgggcagatcgtcgaggcgtatgcctatgccatcgaccgtggcgacagcaagcagcagcaattccagcagatcctgcgcaacctgggcttcacggtaaaactcaaaccctacatccagcgtgccgacggctcggccaaaggcgactgggacgtgggcatcaccctggacatcatggacgccgccgaccacgtcgacgaagtggtgctggcctctggcgacggtgatttcgacatgctgctcgaacgcatcatccaaaagcacggcgttgaggccgtggcctacggcgtgccggggctgacggccaactcgctgatacgcgccgctagccgctacgtgccgattgaaggcgcgctgctgctcaaataaacagttggacggagttggaacaggtttggaacgtatagcagtcatcgactttgaaaccaccggcatcaccccgagcagccactgccgggccacggaaatcgcggtggtcatcctcgaacgcggccagatagtggaccgctaccagagcctgatgaacgcaggcgtgcgcgtgccgggctttatcgaacaactcaccggcatcagcaacgccatgttgcgcagcgcgccaccggccgagcgggtgatgaatgaggtcaatgaattcgtcggcgtcacgccgctgctcgcgcacaacgccgcgttcgaccagaagttctgggacttcgaactgggcctgatccgccgcacccgtctgcaaaaattcgcctgctccctgctgctggcgcgccgcctgatgccatcggcgcccaaccacaaactcggcaccctgaatgccttcgcccaactgccccacaccggcaaggctcaccgggcgatggcggatgcggaaatggccgcgaacctgacggcgcacctggccaatgaactgcgcgccacccacggtttacgcgaactgtcccacgacctgctgtgcaccttgcagaaagtgccggccgcgaagatcaatgagcacctgaaaaaacatcgcgggttctgagccaagcgaagatcaaaatgtgggagccgggcctgcccgcgatggcggtgtatcagccaataattcggtgaatgacacactgcaatcgcaggcaagccagctcccacagtagattgcatccagccttggcaactcggtcatcagtgggagccgggcttgcccgcgatggcgtcaattggcgtggcgatgcagtcagggaataaatgccatcactgaagccggtgagcccgatccgccttccagcgccaatacgccaatcaccagcgttgagcccttcgccggtaaaaggtcgaggttggtcaggcactccaacacaatgccattcccggccagcaccgcgtggttcgtcgcgaatgtgttgctttgccccggatcaaccccgtgggtgtcgatgcccaccccggcgatctggcgctgggagagcaaaaaaccaatcgccgcttcacctattcccggaaagtgcgagccttgtgcgtcttggctgaaaaacgcagcggggtcatgccaccggtgttgccagccggtgtacatcaaaaccaccgagcctgcttcgatcatgccgtgctggcattcccagtcttcaatatcctgcgggctgatttcataatccgaattgctctgggttcgactgcgtacatcaatcaccacggcagaccgtaccaggtcctgcggcttgtagccgtcaatgctcatcccgcccgaataaaaactgttcggcgcattcatatgggtcgcgctgtgctcgccgaggctgaagcggcgcaggaaattaccgtccttttccagtgaggcgatgtcttcgaaggttaccggtgggtcccccggccacagagggatgcgcgatgtgatcgggtggctgaggctgatgacctggttgtgcttacccaccatttttcacctccaactggcccaacggcacccgccgttctatcgcgctcgacaaaataatcgaggtcttgctgaacccgaactgcgcaatccggttgatcaggttctccagctccggcatcgaccccaccgccgcttgcatgatcacgcacggatcgccggtcacgcggtggcattccgtcagctcaggaatctcacccaaggcgtcatacaccttctggctgccatggttggtcagccgcaactcaatcacacactgaatcggcaagcccactttggccaggtccaccttggcctggtagccggtgatcacgccgctggcttccagcttggccacgcgttcggccacggcgggagcggagaggtttacggtgcgggcgagttgcgcgtaggaggcgcggccgtcttcgagcagggcgctgaggagcatgcggtcgtatttgtccatgataaggctccaattgcgcagggctttcgaaagcacgggttatagccttcataaccatgttttgaaaagtgtacgggcgctttaaacaggttttgtaacttatgtttagcgggcggcctttctagaataagcctcccgtctcctgccgcagagctgcccaatgcctggcccacgtcgctttccgttaccgttgatcgctgccttttttgcgctgtatgtgatttggggttccacctacctggtgatccgcattggggtggagtattggccgccgttgatgctcggcgggattcgctttttggtggccggcttggcgatgtatggctatttgcgctggcgcggggcgccggcgccgacctgggtgcagtggaaggcggcggccaagattggcgtgttgctgctgaccttcggcaatggcgcagtgacggtggccgagcacactggcgtggcttccggcgtagccgcgctggcggtggcgacggtgccgttgtttaccttgctgtgcggctatttctggggcgcgcgtaatacgcgcctggagtgggccgggggggtgctggggatcatcggcattgccatgctcaatatgggctccaacctgcaatcgagcccgaccggtgcgatgttgttgctgtttgccgccgcgtcctgggcctttggttcggtgtggagcaagcatttgccgttgccggcgggcgccatggccagtgcggcggagatgatcgtcgccggggtgttgttgctggtgggcagcgcgctgaccggtgaacgcctgcacgccattccgccgattgaaggctggctggccctggcctatctggctgtgttcggttcgatcatcgccttcaatgcctatatgtacttgctcaagcacgtgcgcccggcggcggcgaccagctatgcctatgtgaacccggcggtggcggtgttgctggggatcgtcttcgtcggcgaaaccattggtaaagaagaagcgctggcaatgctggtgatcatcagcgccgtggtgttgatcggtctgccccagtggcgcaagccgaagccggaaataaggtaaactgcggcgcattgcggctttgcgctgaatttttcctacggtaaacacatgactttcgcctcccttggcctgatcgaacccttgctgcgcgcccttgagacgcttggctaccagaccccgacgccggtgcaggcgcaagccattccggccgtgctggccggtcgcgacctgatggctgcggcccagaccggcaccggcaagaccgccggttttgccttgccactgctgcaactgctgaccatggaagggccgaaagtcgccgccaactcggcgcgcgcgctgatcctgtgcccgacccgcgagctggccgagcaggttcacgccagcgttgccgaatacgcccagcatctgccgttgaccacttacgcggtgtacggcggtgtgagcatcaacccgcagatgatgaagctgcgcaagggtgtcgacattctggtcgccacgccgggccggctgatcgacctgttccgccagaacgcgctgaagcttaatcagctgcaaaccctggtgctggacgaagccgaccgcatgctcgacctgggcttctccgaagagctggcgaacatctaccgcatgctgccgaaaaagcgccaaaccttgctgttctccgcgaccttctccgatgacatccgcctgctcgccgggcagatgctcaacgacccgctgagcattgaagtcagcccgcgcaacgtcgccgccaacaccgtgaagcagtgggtggtgccggtggacaagaagcgcaagcccgagctgtttgtgcacctgatgcgcaaaggccgctggaagcaggtgctggtgttcgccaaaacccgtaacggcgtggatgcgctggtggacaagctgcagggcctgggcatcaatgccgacggcatccacggcgacaagccgcaggcgacccgccaacgcgcgctggaccgtttcaagtcgagtgatgtgcagattctggtggccaccgacgtggcggcccgtggcctggatatcgaagacctgccgctggtggtcaactttgacctgccgattgtggctgaggattacatccaccgtatcggccgtacgggtcgtgcgggcaacaccggtgaggcgatttcgctggtgtgcgccgacgaagtgaacatgctctcggccatcgagatgctgacgcgtcagaccttgacccgccagatggagcaggacttcgagccggaacatcgcgtgcccgagactgatgccagcgggcaggtggtgaagaagccgaagaaaccgaagaagcccaaagcatcaggtggtggcggcaagcgcaaccttggcaaatgggtggacagtggggacgtggcgccggcggagccttcgatcaagccggtgcgcaaggtgccggtgtttaataccgggccgcgtaagaagaagtgattttgcggggtggctgagggcctcttcgcgagcaagcccgctcccacatttgactgcattccaaatttggaactcgatcaaatgtgggagcgggcttgctcgcgaaggcggctctgaattcgctaaagtgtcagcgcttaagccattccaacaggccccgcccggccgcccgcccactggcaaaacaccccgtcagcaagtacccgcccgtcggcgcttcccaatccagcatctcccccgcacaaaacacccccggcagttgcttgagcatcaaacgctcatccagcgcctcgaacggcacgccgccggcggtgctgatggcttcatccatcgggcgggtttttaccagtgtcagcggcaacgccttgatagccaccgccagttgcgccgggtcattgaagtgttcagccggtgccaactcgcgcaacaacgcggccttcaccccgtccaaccccaactgactgtgcaaatgcttgctcatcgaccgcgagccacggggcttggccaaggcggcttgcacctggtgcagcggcttgctcggcagcaggtcgatatgcaccgtcgccgcgccatcacggttgatcgcttcgcgaatcggcgccgacagcgcgtagatcaggctgccttcaatcccgctggcggtgaccacgcattcgccgagccggggcttgtcatcgcccaggccaatggcgacgtttttcagcggcgcaccggcgaatttgctgaccatcaattcagtccacgccgacacctcgaaaccacagttgctcggttgcagcggggtgtaaggcacgcctttgtcttcgagcagcttgagccacgcaccgtcggagcccaggcgcgaccaactgccgccgccaagcgccagcagcaccgcgtcgttgtggaccgttttctcaccgtccgggctgtggataagtaagtcgccgtcggcattccagccggtccagcgatgccgggtgtggataaccacgccttgatcgcgcaggcgtttgagccaggcgcgcagcagcggggcggctttcatgtcggtgggaaatacccggccggaggtgccgacaaaggtctcgatgcccaagccatgaatccattcacacaacgcctcggcgccaaatgcccgcaacagcggcgccatatgcggcgcacgctcggcatagcgcgacaaaaacgccgggtagtcttcggagtgggtgatgttcatgccgcccacgcccgccagcaggaatttgcgccccactgatggcatgccgtcatacaggtctacccgcacgcccgcctggctcaagacttcagcggccatcagcccggcagggccgccgccgataatggcgacgtgggaggaggtggtggacatcggcaggcctggtcaaaagcaaagggtgcccattgtaagagatgccgcgcatttgtggtggttgaaagggctgttgtggtcattacaacaagcccgctccccacaggggggagcggtgcccggtggggtcaggcaaagccggtgccggtgttgagcgggtactcatccgagcggtcggcgtcggtgatcgggccgcccgtcaggccgtattggtccagcaccggcaccagggcgccgaagaactggtcctgttgtttctcgcgcttgaccacttcgatgatcgggaacacgaacgaggtgatgatgcccacgcccgccgccgcccagcccagtacaccggcgaaggtgccggcgatggctgccgcgtccgccacgccaaacagcccggcgccgccttcgatgatcgacgccaccgccgcgccggtaccgagggcgccgctggtgagggagaaaccggcgttgagcttgtcaccggcgaaggcgctgttgaccccgctgatcaggccgaacacgccgccgataaagctgccggcgccgccgacgattttgcccaggttgccgagtttgttgaggccgtcggtgttctgcaccattttccccgtcgggaagtcgccaatgccttgtggcttggtggggtcaatcggcgtgggtttccaggccatgccgtagccggcttccttggcgtatttggtaccgccttcggtgatcaacccggcgaactgcatgcctgccgccacacgcccggcgttatcggccgggctgttgccgccggtggccgagcgcgcggccagtacaccaccggcgagcagggcgctgccgatgtgcagcaggccttgcttgtaggcgtcgctggcattgaggttcaggccgtccacggctttgggcagcacgtcgctgatcttctgggtctggcggttgacgtcccacatcgagcggatcagcgaaatcacgtcctgcggcttgatctgcgcgccggtggagtctttgaacatgtccgggttgtcggccatggcctggttgaggatggcggtggtcttggcctcgtcgaagttgccgttggcgtcgccgaaggcgtttttcaacacgtcgtcattggcgccgttgacgaggctgtcggacaccgcctggttgacgtattgctgcacggtggacgagtcctgcgccgagaccttgtcgccgaggaattccttgagcagtgaggcgttggccgcgtactggccgatcacggtcatcgggtcggcattcggtgcggcgagaccgttttgcaggtcctggccactgacgatatggtcctggaagtactgttgaatgtcggcggatttgccggatttgtcggcaatcgcctccaggtccacgctgccgttgccgcccagggccatgtcggtcagggtggcgtcggtacccgccaggctcaggccgtcgaccagtgacaccgggttgccattgctgtctttggtcgccagcgcggtgttgatcacattgccgctgttgatctggctgtcctggtaatgctgcatctcggttttgatcgccgggtcgctgttgacgatgtctttcatgccgctggcctggttctgcgccatgaaggttttgacgtcagggtcggaggccagttgattgacggctgcgtccaattggtcggcgaccttggatttggtcgggttgaggtggtattcgctgtcggcggtgatcccggcatacaggtctccgtcgcccaccttgtcgctggaggccaggcgcgcacgggcgtcgctgagttccagcatcacggcggtcttggttttgccgtcgtagttttgcgggttttgcagcacgtcctgagtcagcttcgaggtgtcgacgtcggccacggagctgcggatcgaggcgttgctgagcatcatcagcacgccgtggtcgtcggtcggcgcctggttctccagccacgcgccgaggtttttctgctgggtgatgccgtcggcggtcgcggtggcgggcaggtcgccggccatgtcgagggtgcgcatcatgccgggggtggaccaataacccgcagcgccggtcagttccgggctcaggccgctgtcgttcttgatggcattgaggttgtcggtggtcaggctgccattgttggcgcgctggttcgggccttccatcgcagggcctgcactgctgaccagcgaaatattggccatgaccagcgcggcagacttggcgtttgccttggccaagtcggtagcgcccgggtttttgctgagaaaggtgctgtaggacttggaagcggctgacaggtccttgttcgactggctgacgaaactgtcgacattgctgtgggtaatcaccccgtcgctgccgccgaggccgccgctgtcgagggcgttcatcaggctcgggctgccggccaggtatttgaggcaggcctgggcttcgggcggcaggtcggcaggcgggttggcgaagtcaatcgggcggtcgtgcatgccccatttgtcccagttgtcgctgagcattttcgcggctgcacgcgggcggtcgaggtcgcgctcttcctgggtcggtgtgccgctggtgttgccgacgatcttgtcccaatccttggggttggcgtattgggaattgtcgatccagttggtgtcgactgcgccgccgacgttgaaaatgccgttggattccttgaccaccgaggcatacaggtcagggctgatggcttgggacacgatgaccttgtcgccggaggcggtttcatagcggatcaggccgtggccgagttcttccggcgtgcccaccaggctgacgctcccggtttcgctggcgtcggcgagggtgtaaccggcgtttttgctgtcgttgatcaggccccaggtctggccgtcgcctgccacctggttgtacaggtcggggttcacttcgcggctgaccacgactttgtcgcccgacacggtttcgtagcggataaggcccgggccgatttcatccacaggcccgatggccttgtagtcgccaaggcccggcgcggtgtcaccggcctgggcgatgcggtagccatcggccttgctggcattgagcgcgttcacggcgtcgaccttgctggacatgccgtcgaagaggtagggcgtcatctgtttgataatgatgatgtcctggccgtcgcgggttttcaggtccaatacgttgtcggaaatcttggtgatgctggcgatgtcggccaagggcacgccggtgttgctgatgtcggcgaggttcgggtcgttgaggcgtttgatggcttcttggtcgccggtggccatgacgtcggcgatcttctggtctttggtgttgtcggtgacgccgctggccagcactttgaagttgccgggtttggcggtgtccttgaagcccgccacggcgcgggccatggctgcttcaaaagtggatgcgaccttttttaacgcgtcgtcattgccggggggtgtcacggtgccgatcttgtaagttgccatcgccggatactctggaagcgggaaggctttcagggtgacggcggcgtgaggcagttttgtttcaaatctggaacaggtgcgatgttccacaacgtttcacggctgtggacaagtatctggtcaaaaaacgtacagttgcgtgcaggccatgtgcctgcgcgctttcagacgcttacgctcaagttatccacaggtggttccacaggcattgtgggtaacgctcacacttcaatgacagcctgatgacgtccatacccgttgcgcgctgtggtgcaggatgccgtggcggcgggccagggcaaggcggtccttgctgtagccgccgccgatcacgcccatcaccggaatgtcgcggcccaggcaatggcgcatcacgctttcatcgcgggcggcgacgccagcgtcggtcagcttgaggtaaccaagggcgtcgtccttgtgcacatctacgccggcgtcgtagagcaccaggtcgggttggtagagcggcagcaggtagttgagcgcgtcatcgaccaccttgaggtagtcggtgtcgcccatgcccatgggcagcgggatgtcccagtcgctctgggccttgcgcgccgggaagttcttttcgcagtgcagcgacacggtgatggcgtccggcgtgtcatggaggatgcgcgcggtgccgtcgccctgatgcacgtcacagtcgaagatcagcacgcggttgactcgcccgctggccagcaggtaatggctgatcaccgccaggtcattgaagatgcaaaagccggccgggtaatcgtagtgggcgtggtgggtaccgcccgccaggtggcaggccaggccgtgttccagcgcctgctcggcggcgaggatcgaaccgccgaccgcgcgcaccgtacgccgggccagggcttcgttccacggcaggccgaggcgccgttggtcttcgcgggacaactcgccactcatgtagcgttcgatatacccggtgtcatgggccagggccagaatctggggcgggcacagctcggggcgcagcaattggctgtcctcggtcaggccgctatccaccaagtggtcgcgcaacaggcgaaacttgtccatggggaagcggtggtccgccgggaactcggggctgtagtcatcgtggtagatcaggggcagtggcatgggattttctgacgggaacctgcgacgcatcttacccgcgttgtacactcacgcacatggcaagggaggggacccatggagccgatactggaattggaaagcgcacggctggtgctgcgccaatggcgcgacagcgacctgacggaatttgcgcgcatgtgcgccgacccgcaggtaatgcgttatttcccggccaggctgagccacctggaaagcgcggcgctgatcggccgcattcgcgggcactttgccgaatacggttttggcttttgggccttgcagcgcaaggacaccggcgagttcatcggcctgaccgggctgcaaaacgtcaatttcgaagctgggttcaccccggcggtggaaatcggctggcgcctggcccgtgagcattggggcctgggttacgccagtgaggcggcgtggacggcattgcgctgcggctttgatcgcctgcaactggacgaaattctcgccttcaccactgaagccaatctgccatcacaaaaagtcatgcaggccatcggtatgcattacgatccccaggcagattttgaacaccccaaggtcgcagccgatgacccgctgcgccatcatgtgttgtaccgcatcacccgcgcccaatggttggatacgctgcacggataagcagcccggaatgccccatcgtttgtaggagttgctctatgagccaagtattggaagatctggtggacttgctgaccctggagccgatcgaggaaaacctctttcgcggccgcagccaggacctgggttttcgccagttgttcggcggccaggtgctcggccaatcgctgtcggcggcgagccagaccgtagaagaagcgcggcatgtgcattccttgcacggttattttttgcgcccgggcgatgcggcgttgccggtggtgtattcggtggaccgcgtgcgtgacggcggcagcttcagcacgcggcgtgtgaccgcaatccagaagggcaacccgatcttcacctgcagcgcctcgttccagtacgacgaagaaggcttcgagcaccagaccaccatgccggtggtggtgggcccggagaacctgccgtcggagctggagctgacccagcagcgcgcgcacctgattcccgagcacatgcgcgaaaaattgctgtgccccaagccgatcgaagtgcgcccggtcaccgagaaagacccgttcaacccgcagccgtccgacccggtcaaatacgtgtggtttcgtgccgacggtgcgttggccgactcgcccgcgctgcacaaatacctgctggcgtacgcctcggactttggtttgctgaccacctcgttgctgccccacggcaagaccgtgtggcagaaagacatgcaggtcgccagcctcgaccacgcgctgtggttccatgccgacctgcgcgccgatgactggttgctctacgccatggacagcccgtgggccggcaactcccgcgggttctcgcggggcagcgtgtacaaccgtgccgggcaattggtggcgtcggtgacccaggaaggtttgattcgccatcgcaaggactgggcatgagcctcacggacatcaagcattgggtgttcgacatggacggcacccttactgtggccgtgcatgattttgcggcgattcgcgtagcgctggagattccgcccgaagacgacattctcacccatctcgccgcgttgccggccgacgtggcggcggccaaacatgcctggttactggagcatgagcgcgagttggcgcaggattcaatcgcggcagaaggtgcggtggagctggtgcgtgaactggccgggcggggttttcgcttgggcattctgacccgcaatgcgcgggagttggcccacgtgacgctggaagcgatcggcctggcggactgcttcgccatcgacgacgtgctggggcgtgaggatgcgccgcccaagccagaccctggtggcttgctgaagctggcggcggcctgggatgttgcgccgagcgagatggtgatggtgggggattaccgctttgacctggattgcggccgggcggcgggggcacgcacggtgttggtgaatttgccggagaacccgtggccggagcttgccgattggcatgcggaagattgcacggttcttcgcgggatgatccagcccggacactgacaatcaaatgtgggagccgggcttgcccgcgatggcatcacctcggtatgcctgatggaccgaggtgtttgcatcgcaggcaagccagctcccacacaagctggctcccacatgtttgatctatttcccgaacaataccttctcgccctcaggcgacgtaaacatcccgtccccgttatgcccaacccccggcacttccaccagtttgtgagccaactgcgggtggcgcgccttgaggtagtcaaaatagttgtgcccacgaatcaggcgatacggcccctgggtttcggcttcgcagcttttatccagcgccgggtggttcgggtcggtgtcttgctggcccagcaggtaggtcacgtcgcgtgacacatacgcctgctcaagctgttgcgcgctctggcctttggcgtagtcgggcaggttctgcatgccgtatttccagtcgttgaagccggggcaactggagacgtcaaacttcaccgggcgttgtggcgtgaagtaggcgtaggacgatgggttggcgaccacatagcgcaggctgatgccttcggtttgcagcatcggatgatcgtggccggtgacggcaaaacgctgcaccacctggccaccgccggaatgcccggccaccacgatttctttcaacgccgggaacagcttgcggttgcccaggtgcttgatgatctggtcgagggcgccgtaagagctgatctggcctgggccggtcgacgggtcgcccgccatccagtcattgccattccagcgcagcaccccgttgtcgaggtggttgcgtttcacgtcggacccgttgagaaactgtggcgcgatcaccagcgtgttgcccgcctggcctgcatccttggcggcatcttcaccgctttgcaggtaggtctgcgcgttgcgcaggcggccatgcacgatgatcagcgcgcgggtgacctggggcagtggtttgctccagtcctggctcaggccgacgctgaggtcaccggcgtccaggtgaaaacgatcggggctgacttccttgacgccgtgttctttctcggcggcccaagtggtggtggagcaggtcatcatcaagccgagcagcaaacccaatcgtttattcatttagagactcttggcggtaaaggtgtcgcattgagtgatctggcccccggcgaagccagtcttgaaccagcgaacccgctgtgccgaggtgccgtgggtaaacgagtccggcacgacgcgcccttgaccctgttgctgcaaacggtcatcgccgatggcgttggccgcgttcagtgcttcttcaatatcgccgggttccagccagttcaggcgcttttgcgcccggttggcccacaccccggcgaagcagtcggcttgcagttcctggcgcaccaacaggccgccatcgccctgcatctgccgaccttgctggcgcgcggcctgaatcttggccgagatgcccagcagtgtttgcacgtgatgcccgacttcgtgggcgatcacataggcctgggcgaaatcgccggcagcctggaagcgttgtgacatttcccggaagaaatccaggtccaggtacacctgttggtcagccgggcaataaaacggaccgctggccgaggtggcgcccccgcaggcggaattcacccggccacggaacagaatcagtttagggttcttgtaggccaacccgttttcctggaacacctgagcccaggtatcttccgtgtcccccaaaatcgcgcggacaaaatcagcctgctggtcattggccggcggcgcctggcgcggctgcgtgctcacttgaggcgcctgctccatctggccggtcagttggccgaggatctgcagcgggtcctggccggtcagccagccgatgcccacgatcagcacaatcgcggtcaggctcaggcccttgccgccaccgaaccgcatgcccccgcccccaccgccactgtcatcgcgggcatccaccacgttgtcgctgcgtcggccttttttccatagcatggggcaatcctctcgataaaccttggggaacagtgttgttggtgctggggcatggcgccagcccggctgtccgacaggtacgagagcggcttagtatcgctgctgtcaggccgtgccggcaggggcgccagatgaaagttgtgtcaggttggcaagtcagtcgcggcagtaaccttcgccggtatcgacgatcaggcaatcctttttatccgccagccatttcaaaccggtggcttcgccgtcaccggcgctcagttgctgcgggccgtcggggcgggtgaaggcaatgccgtcttcgttggcttcgcccttgaaggtgccggagtcgtcggcgtcgaggccgtattgcatggtcagaatgtagtggccacggccaatgctgtcgtctttggcgatggtcaggttcaaaccttccacgccgatccacttgccgacccatttatcggtgggcggggtggccggtaccagggtggcttgcaccgacgccggtgccggtttgggggcttccttgggttccttgttgcaggcggtcagcagggcaagggcggacagaacaaagatggtttttttcatagcgggcggccttggttaaaaagtgttcaacgcgcaaagagaactgcaacgttggactggtatcccgtgatttagtgcgctgttcgcacggtgtttggttatgctcttggggcagacgcaagcccggctgctagattaccgggtcgagtgcaaaagcgttcagcccgccacgcaagagaattcaatgactgtcagcacccccctttccggcgtcaaccatcccttcaaaggcatcctgctgattgtgctggcgacgtttctgttttccagccacgacgccttgtccaaatacctggccgggttctacccgatcgtgatggtggtgtgggcgcggtacctggtgcacaccttgctgatggccgggattttcctgccccagtcgggcctgcgcgtgctgcgcagcaaacgcccgggcatgcaggtggtgcgcgcattgtgcctgttgggcaccagtttgtttttcacggcggcgctgcactacatcccgctggcggaagccacggcggtgaacttcctggcgccgatcctggtgaccgcgctttcagtgccgttgctcggcgagcacgtgacgcggggccaatggctggcagtgatctgcggctttgtcggtgtgctgatcatcatccaccccggcggtgagctgtttacgccggcggtgctgctgccgctgtgctcggcgctgttcttctgcttttaccaattgcttacgcgcatcctcagccaatatgacacgccgaccaccagcaactttttcgccggcctgtgcaataccctggtgatgagcgcgctggtgccgttcttctggcaaatcccgacgctgtggcacggtgcattgatgctggcgctgggcacgtgcgggatgaccgcgcacttgatgttgacccaggcgttccgcttcgcggcgccggccttgctggcgccgttcggttattgccagatcgtgtttgcggggttgttgggttggctggtgttcaaccatacccccgacgtgaccacggtggtcggcatcggggtgatctgcatgagcgggctggccgctgcctggcagcagcggcgcaagtagatcaaacgtctacggtcggaatcttgcgcggggccatgaagtacatccacgccagcgcaatgaagtacatcgccgggatcagggtgaacaacacggtgtagttgttgtgggtcacggtcaggatatggccgacgatctgggtcatgaacatgccgccgatggccgcgcacataccgccaaaaccaaacaccgtgctcatcatgtgcttgggcgtgtagtccatcaccaggctccagatattggcggtccaggcctggtgcgcgccgatggccagggagatggcgaacaccgcgacccacagctggctggaaccggcggccatgatcacgccgacgatgcaacaggcaaacagcagcatcgacagcagccgcgccttgatcgggttcatcccgcggccgatcaggaatgacgacagaatccccccgccaatgctgccgaagtcggccgtcaggtaaatgatgatcagcggaatgcccatctgggtcacgttgatgcccaggttgtattgctggttcaaaaacggcggcagccaatacaggtagaaccagaacaccggcgcggtcatcgaataggcgagggcgaaagcccaggtgccgcgcatgcgcaggatgcggctgaagggtacgcggggctgttccggttcgacttcctgctgcacgtagtccagttcggattgtttaacggtcgggtggtcttcggggttgtagtacttcaagccccagcacaccagccaaatcccgccgagtgccgacatgcacaaaaacgccgcttgccagccccagacgtggaggatcagcggcagcagcatcggcgtcatcatcgcgccgacgttggtgccggcgttgaagataccggtggccactgcgcgttccccggccgggaaccacagccgtgtggtcttgacgcaggccgggtagttggcggcttcggtcagcccgaggataaaacggcacaccataaagcccaccgctgaggtggccaggccgtgggcaccggtcgccaggctccacagcaacacggcgcagaagaacacacgctttacgccgatgcgatcgatcaggcggccttgcagcacaaacccaatcgcgtagcccacctgaaaccagaagttgatattggcgtagtccatcgccgtccagctcatttccttggcgaggatcggctgcatgacgccgagggcggcacggtcgatgtagttcagggtggtggcgaagaacaccagggccagcatgccccagcgggttttacccacggccagggcgccgcggactttgtcgccgatgccggcgtgcgggttgcccgggcgcgcggccaggacggagttttgcgaaggcatgaggtcgtacccgtttttgaaatttttatggtgtgttctgggtcttcttgcgtgttcgatggtgcgcagcgactaaaaaatcgtcaattcgccaaaggggcatagtgttcgataatcgcaccgaaaactaaccggttcgtacattttaattgctgcgtgtaggctgggggcgaataatttgccacaaataacaattgccgggagtcgccccatgcaacgttccatcgccactgtttccttgagcggcaccctgccggaaaagctcgaagccatcgccgctgccggttttgacggggtcgagatcttcgagaacgacctgctgtattacgacggcagcccgcgcgaagttaagcaaatgtgcgccgacctgggcatcgccatcacgctgttccagccgtttcgcgactttgaaggttgccgccgcgaccgcctggcacgcaacctcgagcgtgccgagcgcaagttcgatttgatgcaggaactgggcaccgacctggtgctggtgtgcagcaatgcctcgccagactcggtgggcgatgaacgtattttgctcgatgacctgagtctgttggccgaacacgccggccgtcgtggtgtgcgcatcggctatgaagcgttggcctggggcaagcatgtgaacacctggcaacaggtgtggagcctggtgcgccaggtcgatcacccggccctgggcgtgctgctcgacagcttccataccctgtcgctcaagggcgacccgagtggcattgccgagatccccggcgacaagatcttctttgtgcaaatggccgacgcgccgatcctggccatggacgtgctggagtggagccggcatttccgttgcttcccggggcagggcgagttcgacctcgcaggctttctggcgccgatcatcaaaagtggctacaccgggccgctgtccctggaaattttcaacgacggttttcgcgccgcgccgacccgggcgaatgcggcggatggcttgcgctcgctgctgtacctggaagagaaaacccgcgcgcgcttgcagcaggaggcgccggcgcagcccgtcgagattctgtttgatacgccgcccgccagcgaatacgacggcattgaattccttgagtttgccgtggatgaaagcctcggcgccaagctcacgcactggctggaacgcctggggttcgtcaaggccgggcagcaccgctccaagagcgtgagcctgttgcgccagggcgatatcaacctgatcctcaactgcgaaccctattccttcgcgcataactttttcgaggcccacgggccgtcgctgtgcgccacggcggttcgcgtcaaggacagtgccaaggccctggagcgtgcggtggcttacaagggccagccgtatcgcgggctggtggggcccaatgaactggagttggcggcagtgcgcgcgccggatggcagcctgatttatctggtggacccgtccgaaggcgcgctgtacgacaccgacttcaacctgcaacctgccgcgtcatccagtggcggcctgctgcgcatcgaccacatggccatggcgttgccggccgacagcctcgacagttgggtgctgttctacaagagcttgctggatttcgaagccgatgacgaagtggtgctgcctgacccttacggcctggtgaaaagccgcgcgctgcgcagccgttgcagcacgattcgtttgccgctgaatatttccgagaaccgcaacacggcgatttcccacgcactgtcgagctatcgcggctcaggcgtgcaccacattgccttcgactgcgcggacattttcgccgaggtcagccgggccaaggaggcgggcgtgccgttgctggatatcccgctcaactattacgacgacctcgcggcgcgctttgattttgacgacgagttcctcagcacgctggcgtactacaacgtgctgtatgaccgtgacgcgcagggcggtgagttgtttcacgtgtacaccgagccgttcgaggggcggtttttcttcgagatcatccagcgcaagcacggttacgccggctacggcgcggccaacgtggcggtgcgcctggcggcgatggccaaatcacgcagcggcgcggtgcgtcaggcgcgtttataagggcgggccgggtgcttccttcggcgagcgtcgcggcccataatcaccgtctgcatacaatggccgtgagcgcaccatgacctcgagtcccgaactccccgcggtgtcagacgcaccgcgcaagagtcgcaaaaacaatccggaaaagacccgcgaaaacatcctccaggaagccattgtcgagtttgttcagcagggcctttccggcgctcgcgtggacgctatcgccgagcgcatccacacctcaaaacgcatgatctattactacttcggcagcaaggagcagttgtacgtcgaggtgctggaaaagctctacggcgacatccgcaacaccgaaacccgtatgcacctcactgagcttgagccgcgcgaggcgatccgccggctggtggagttcacctttgatcaccacgaccagaacgtggatttcgtacgcatagtcagcatcgaaaatatccacaacgccgaatacgtgaagcgttcggatgcgatcaaggcgatgaacagcaacattcttgaagcactgggcgccacgttgcggcgcggggctgaaatgggggtgtttcgcgaagggctggagccgttggacgtgcacctgctgatcaactcgttcagcttttaccgggtgtccaaccgccatacgttcagtgagatttttcagatcgagctgtcggatgaggccgtgaagcaaaggcatcgggagatgatttgtgagtcggtgatgcggtatctgcaggcctgaatcttcagactgtaatgcaatcaatgtgggagctggcttgcctgcgatagcgatctgtcagtcacatcatcgttgactgaaccaccgctatcgcaggcaagccagctcccacaatttttgatccggtttcggcggtcaggtgttcatgctttgaaagtgctgcaacatcctgtccgcatccggcgtttcgccactgaacaactcaaacgccttcaccgcctgaaacactgccatgttgccaccatccagtgtgcggcaacccaatgcacgggcatctcgcagcaactcggtttccagcgggaaatacacaatctccgccacccacaattcagcccgcaacagggccgccggcactggtgtgcccggcagtttggccatgcccatgggcgtggtgttcaccaggccatcggcctcggccatggcgttttccaggtggctgcccacctgggcgcggccggcaccaaaacgctgggagaggttatccacaaggtcgcgggcgcggctggggtccacgtcaaaaatactcaagtgttccacaccctcggccaacagtgcgtgcgctactgccgcgcccgcgccgcctgcgcccatctgcaccacgcgctggcgggcgacatcgttcaggttgcggcgaaacccttcggcaaagcccaaacaatcggtgttgtggccgatgcgtttgccgtccttgaacaccacggtgttcaccgcgccaatgcctcgggcctcgtcggataattcatcgagcaacggcagcaccgcttgcttgcacgggtaggtaatgttcaacccggtgaactgcatcaactcggcggcatccagcaggtcgggcagggcgttgatggtcagtttgagtggttccaggtcaatcaggcgatacaggtaacgcaggccctgggcgtcgccttcgcgctcatgcagggcgggcgtgcgggaggcctggatgccggcgccaatcaggccagcgaggatgggcggtttcatcgggctcatcccttcaacgtgtggctgaaatgctcgagtgccaggtggtagccatggctgccgaagccggcgagcaccgctttggcgatgggcgacacaaatgagtgatgccgaaacgcctcgcgcgcgtgcacgttggataaatgcacttcgatcaccggcacttcactggccaccagcgcgtcgcgaatcgccacggaggtgtgggtccaggccgccgggttgatcacgataccggcgcagcgggcacgggcgctgtggatccagtcgagcaattcgccttcgtggttggtctggcggaattcgattttcaaaccgagtttttccgcgctgcggccacacagggcggccacgtcagccagggtttcatggccataggtggcgggctcgcgagtgccgagcaggttgaggttggggccgttgagcaccagcacgatgggcggcattgggggtatctccacagttattattcgttgtggagataaaatgtaccggatggttaatttggtcaattgatcgcagcagatgtgttcgattaccgaacccttaatccaaaccttctcgcggcggaatcagactagatatcaattgaaaatcattctcgacaacgcttaagatgcccgcctgtttcctcaacattccagggagtcggtttgtcggacgtggatctcaaaggcctgtttctcaagcatgccgataccctgcgcgggtatctggcgcgcaaggtacgggacccgcagttggccgcagacctggtgcaggagagttttctgcgcctggcgcaaaagccggccgacgagcgcatcgacaactcccagggctatctctatcgaacggcgagcaatctgctgatcgaccatattcgccaggaagcgcggcgcaagacagactccgtgccccatgaggcgctggccgagattgaagatgacgtggccgggttggaggctcaggcaatggcgcagcaacagcggcaggcattgaagcaggcactggcggagttaccggaacgcacccggcagatattccgcttgaatcgcatcgaaggcatgacccacgcccaggtcgcccggcacctggacatctctgacagctccgtgcaaaagcatctggccaaggccctggcctatgtgatgcaacgtttgcaggaaggcgaagtggcgccacccgacgaatgaattaccgaaaaactctgggtcagacgtcacagcgtttacataacgaaaattcgagattcacacgtgaatagccagggtccgcaacagcacagcattaccgaggcggctgccgagtgggcggtgcgcctgcacgccggtgccctgaccgaacaggagcaggccgaactgcaacactggatcgcctgcgacagccgccatgaagcggcattgcgctttgccgagcagacgtgggcggccttgggcgagttgcacgaggatgagccggtgcatcgccagcggccggtgccggcggcgtcgcctgtgcgccgaaccaaacgtcgaaggccctggcagcgcgcggcggccgttgcattggtcgtggtggtggccggtgtcggttggctgcacgggccggatgcgctgctgcggatgcaggccgattacgtcacgcaaaaaggtgaggtgcgaacggtgcacctggccgatggcagcacggttgaactggattccgccagcgccattcgcctggattacgacggtgtgcaacggcgcatcagcctgatccagggctcggcgatttttgatgtggcaccgatggtgggtgaagaggcacggccgttcgtggtgcaaagtgccggcgggcaaacccgtgcgttgggcacgcgctttgtggtcgagcgcgaggatgagcggcaggcctgggtcggcgtgctgcagcacagcgtggaggtttctctgcaagctacgccgagaacaggccccggcgaacgcgtgctgaaggagggccaggcggcgcgctacagtcctgacggtggcgtggtgccgctcgatcaattcgatgtggagcgcgccaccagttggcgacgcggcgtgttgatcttcgaccggttgccgttggccaacgtcatcgaacagctcaaccgctatcgcccgggccgcgtggtgttggccgattccgcattgggcgaccgtgaagtcagcggcgtgttccgcctcgacatgctcgacaccgcccttagtacattgacccgcgagcttcaagtgcaacgcttggacctggccggcctcagcctgatctattgatgacccggtgggggctcctcccaccgcctgcaaaaccctcctctgaaaaactttcaaaaaaaccttactgacttcccgcgcctcgcacgtcttgctaggtgagaagcattcgcataaacaaaaatacgcttagcgcagggaaacttcacatgtcagcactcaccaaggggcgcatcaccggtagccggttggccctggccattcacctgggcttgttcgccgttgcggcgcctgtctatgccgcgcagccgcaatcgggtgctgcccagcctgcggtgctgacgttcgatattcctgtgcaacccctcggcagtgccgtattggccttcgccgaccaggccggcctgcaagtgctgttcgacagccagcgcctgcaaggcttgagcagcacggcgctcaagggcagcttcagcgtgcaggagggcctggggcgtttgctcggtgctgcgccggtggagtaccgctttaccggtgaacgccaggtgaccctcaaccgtgtcgccgccgaccacgacagcgcgatgaccgtcggcaccaccaccattaccggcaacaccaacggccaggccggtgactgggtgtaccaaaccccaaagtccgtggcggtgatcagccgtgacatgatcgacaaacgcccgccgcgtcacgccgccgacatgctcgaagaaaccgctggcgtctacaccgccgtcaaccagcgcgatcccggcctgtcggtgaacatccgtggcgtgcaggactacggccgcgtgaacatgaacatcgacggcatgcgccagaacttcaacgtcaacggccaccagcagcgcaacggcacgatgttgatcgacccggagttcatctccagcattgaaatcgacaaaggcagccagtcaggccagggcggggcggcggtattgggcgggattgcttcgttcaagacgctggaggccagtgagttcctgaaggatggcaaagaaatcggcgggcgttttcgtgccggcagtggcatcggtgagctgggcaatggcacctacttcaatggcagcggagtgtttgcctttggggatgagcgcggcgatgtgttgctggggtacagcgagcggcatttcggtgattaccggggcggttcgcacaacgatcagaacctgggcaccaacctgcgcgccagaaaatatgcgccagccgcgtttgaccattggttgaacagtgaagtgggcgattcgggcagcgtcacgcgctcacagctcctcaagttcggcctcaacctgcccaatgaccagcgcgtgcaactgagctacctggaaagcgacaccgacagcaacgatacctggggttacatcacccaagacctgcaaagtaactactacctgcgcaacagcaaaaacaacctgaacgccaaaaacgttgcgctggattaccgctatacaccggacaacccgctggtcgatttcaaggccaaggtgtatttcgtcaccactcaggaagaccgcgacaatgcgccgaacacggcgtcagtgagttcgggcaattacacccccggctacaccgaccattttcaaaccgacacctggggcctgcaggctgacaacacctcgcgctttgacttcgatgcattcggccacctgagctggaactacggcgtggaggtttaccaggacaggttcaagccacacagcaataaggtcgaatcaaccaatggcgccaacggggtgttgccctatgtcgaaggtgccaacccgctcggcaagcgcaccattggcagcctgttcaacaacctgcagtacgaatatgacggctggctgacgctggatgcgggcctgcgctatgaccgttaccgcctggaaggcgaaaccgggatgacgctctataaacgcccggccattgccaacagtgtggagggcgcccgccgcgtcgatgaggtctttgatgtggaccgggagcaggggcgtttctctcccacgtttggcatcggcatcaaacccgggcccgactggctgcaactctatgcacgctggggcaaaggctggcgaccgccggccgtcaccgaaaccttcatgaccggccggccccacggcggcgcttcgggcgaacgcgtgttccccaaccccttcctcaaacctgaggaatcccgggactgggaaatgggcgtgaatgtgttcaaggagtcgctgtttttcaatgacgacaggctcggagtaaaagttgcctacttcgatacccgcatcgagaacttctcgttcctgaaccacagcgtcacgttgcccgaaaccaacgtgggcggctttaccgggatcatggcgtacaccaacaacctgaaccccacgcgttttcgcggtatggaataccaactcaactacgacatgggccgtgcctatgccaacttgagttacacccacatgatcggcagcaacgagttctgctcgaagaactattacatgggcggcgcgaagaaacgcgggcgcacgctcagctccaaatatgagcgctatacccgccccaacggcacgaccggcctgcggcttgtcagcacttatgaatggctcgatgacgctgcggcgaacgacaaggaaagttgcggccgcatcatgggcaacgccacctacatgccggctgaccgcggctccctgaccctgggcgcgcggttcctggacaagcgcctggataccggtgtgcgggtgcgttacagctccggcaatggtgaaaacctgaataaccagggctacgactttatcgaccaggcgatgtggcccaagtacacggtgtacgacctgtacgccagttactggatgaccgaccacctgaacattgcgctctctttggaaaacgccaccgacgaggcctatttcgtcgccatgggcgatgccaataacttgagcctggcgcgcgggcgcaccttgagtggaatgctcgaatacaagttctgaccgagtgcgcacgctgcgcgctcagtaaacagttttgcccaagggtgggcaaaaagtgcgccggagtgcgtgctgatcaatagcgttgtttataacgaggtttagtgatgactatttctgttaattacgagtcggctctcggttctatctcgctgtcggactacctgacggattgggcggcaggttttgccacggcaggtcacggcaccggcaataccggtggtttcagcaacggcacgttcagcggcgatcaatactcgactcacggcgccaatggttccgaatacgccttcattgcagacagcaataccagcaacggcctgcactatgtcttcaacccgacgctgccagcttccgacaaccagaaccactacctgtggggcaacctagataacgtcgaactggggacaggcctgagcggcggcagcggcagcgattttgacctgagcggttacaaagccgccttcaacggtctcgacctgtctgccgccagcggtgcaggccgtgccggtaacgtggttcaggacgtgatctacggcctgatgcagggcaacaccaccgcgctggaaaccgtgctcaacaacttgctggacgactttggcctgtctaccgcttctaccttcgaccaactggcggctgccggcctggggcacgcgaccccatccgccgacgttgcgctggtcggtgtgcaagacgtggcgcaggactgggcactcgcagcctgagcatctgttgcatgaaaaaagcgaatggaagatcactctcccattcgccgcattacaccgttgtcgcccaagccttctaattcttcaggcgacgacggtgccaaattctgcgcagcgccgtatcgcgtgtcaacgcggcggcgctgcccgcttaaccctttgagaatcccagatgcgccacgccggcaacgaaaccctggccgccctcacggcctataaaagtggcttcttcaacatcggcctgttctcggcggtgatcaacctgctgatgctcgccccggcgctttacatgttgcaggtgtacgaccgcgtgttggcctcgggcaatcagatgactttgctgatgctcacgctgatgatcctcggcctgttcggcctgatgggcgcgctggagtgggtgcgcagccaagtggtgattcgcctcggcacgcaaatggacatgcgcttgaacaggcgggtgtacgacgccgcgttcgaagcgcaactcaagggtggcacccaggccgcaggccaggcgctgcatgacctgacgacgctgcgccagttcgccaccggccaagcgctgttcgcgttttttgatgcgccgtggtttccggtgtacttgctggtgatctttgtgtttcacccctggctcgggctgctggcccttggcggggcgctgattttgatcgggctggcgtgggtcaaccatcatgtcagccaggcgccgatggcccaggccagccagctgtcgatcagcgccagccaacaggccacggccaacctgcgcaatgctgacaccattgaagccatgggcatgctcgctacgttgcgcgggcgctggttcagccagcatcaggcgttcctcgcccagcagaacctggccagtgaaaagaccgccgcggtcaccgcctggtccaagggcgtgcgcctggcattgcagtcgttggtgctggggttgggcgccttgctggcggtgcagggcgatatcaccccggggatgatgattgccggttccatcctcatgggccgggtgctcagcccgatcgaccagttgattggcgtgtggaagcaatggagttcagcgcggctggcgtatgaacgtttgtcgcatctgctcgcggccaatccggcacggccggagcgcatgaacctgccggtgcccaaaggccaattgagtgtggaacaggtcagcgcctgcgcacccggcacgcgccgcccggcggtgagcaacctgggtttcagcctgccagccggtgaagtgctgggggtgattgggccatcgggctgtggtaaatccacactcgcccgggtgctggtgggcgcgtgggcgccgatggcaggcaaggtgcggttggacggtgcagacctggcgcagtgggacaagagccaactcggcccacacattggctacttgccgcaggatatccagctgttcgccggcagcatcgcgcaaaacatcgcgcggtttgccgacgtggacgcggacaccgtgctcgccgccgcgcaaatggccggcgtgcatgaactgatcctgcaactgcccgagggctacgacaccttgctgggggagggcggtgcgggtttatccggtggccagaaacagcgcgtggctctggcccgtgcgctgtatggcttgcctgcgctgatcgtgctggatgagcccaacgccaatctcgatgaagtgggcgaacacgccttgctccaggccatcgcccagctcaagcagcagcgtcgcacggtggttctggtgacccacaaagccaacattttgagccttaccgaccaattgctgatcctcaaggatggccagatgcaggcctttggcccgaccgcacgagtgctggaggcgcggcagaaacctgcggcgaacaaaccggttacgagcatgagttaccgcctcggtgaaggaaaacaggcatgagccagatcaaaccggtgtggggcagcgagccgccgaacaatgtgctggcgctggacgacaggaaatattcgcgcctgggctggctgctggtgcttggcgggtttgccgggttcctcggttgggcggcgttggcgccgcttgacaagggcgtggcggtgtccggcaaggtcatggtttccggccatcgcaagacggtgcaacacccttccgggggcatcattgagcgcattgaagtccgtgacggtgaggtggtcagcgccggtcaggttttgctgcggttgaaggaaacgccgttgcgcgggcagatgcagtccttgcacagtcaatacctcgcctccctggccagtgaggcgcgtttgaatgcagagagtgaaggcttgcccgccattgatttcgggccgcaattgctcaatgactccgacgccaccagcacgctggctttgcagcggcaactcttcaccagccgagcccagtcgctggcgaccgaacagcagggcctgcgtgaaactatcgctggcgccgaggcccagcttcgcggtacgcgggactcgcaagcgagcaaagtccagcagcgcgccgcgttgaatgagcaactgcagggcttgcgtgaactggcacgcgacggctacatcccgcgtaatcgtctgctcgacagtgaacggttgtatgcccagcttgacggcgccattgccgaggattttggccgcatcggccaattgcagcgccaggtgctggagctgcgcttgcgcatccgccagcttggcgaagacttccagaaagacctgcgcagccagcttgccgatacccgaacgcgcagcgacgacttgcgcaaccgcctggcctccgccgagttcgaactggccaacagccaggtgcgggcgcctgcgtccggcgtggtagtggggttgcaggtgtacaccgaaggcggggtgatcaaaccgggccaggcgttgatggacatcgtgccccagggcgaaccgctgctggtggaagcgcgggtgccggtgcagatggtcgacaaggtgcacccgggcttgccggtggagttgctgttctcggccttcaaccaggccaccacgccacgggtggcgggccacgtgacgctggtttcggcggaccgtcaggtcgatgaacgcaccgatgagccttattacaccctgcgtgcccaagtcagcgcagcgggcatgcagcaactggccggcgtgcaaatccgcccgggcatgccggtggaaaccttcgtcaaaaccggcgagcgttcgatgctcaattacctgttcaaacctttgcttgatcgcacccatatggcgctggtggaagaatgaaggcgttgttgtttgccctgtgttttggctgtacttcggcggcgcacgccttggggttgttggacgcctatgacctggccctgcgcaacgatccgacctttcaggcggcgatccaggcgcgtgaggcgggcgaagaaaaccgcgtgatcggccgggcggggttgttgccgaacctgtcctggaattacaacaattcgcgcaacacctctgaagtgacggcgggcaacgccaccagcgaccgcgattaccgcagctatgcctcgaccctgaccttgcagcaaccgttgctggattacgaagcctatgcacgctttcgccagggcaccgcccaagcgctgatggctgacgagcgctttcgcagcaaaagccaggagctggccgtgcgggtgctcagtgcctacagccaggcattgctggcccaggaacgcatcgagctgagccgcgcgcagaagcgcgcgtttgccgagcgcctgcaactcaatgaccgtttgctcaaaggcggtgaaggcacgcgcaccgatgtgctggaaacccaggcgcgcctgagcctggcgcaggccgaggaaatcgaatcgatggatgcccaggacagcgctttgcgcgagctggaagccattgtcgggcaacctctgcaaatcgaagcactggcgcctctggcccgtcagttcgaaacgccgccactggaacccaatcgcttcgaaacctggcgtgagttggccatggcaaacaaccccgagctcaagtcccagcaccatgctctggacgttgcggaatacgaagtggagcgcaagcgtgccggccatttgcccaaagtcagtctgtacgccagcagtcgtcagaccagctccgattcggaaagcagctacaaccagaagtacgacaccaacagcgtcggcatccaggtcagcttgccgctgtttgccggtggcggggtgtcggcttccacgcgccaggcggcgaaccaactgtcccacgcccagtttgagctggacgcccaaacctcggccacgctggtggaactgcgcaagcagttcaacctcaacaccagcggtgcagcaaaagtgcgtgcctatgaaatggccgtcagttctgccaccgcgctggtcaccgccacccaaaagagcgttgttggcggtgagcgcgtgaacctcgacgtactcgatgccgagcaacaactcttcaccgcccgccgcgacctggcgaatgcgcggcatgcgtatttgctggcaaggattcagttgaagtattacgcggggttgctcagcgagcaggacttgcgggtgttggcggggtacttccagccgtcggcatgagtggttacaacccggcgttcgccgggttgtctgtcgttactaatctgtgaaacagctccagttgcaggagccggttgtcgggcggcacgcggaaaagtgttgcctgaaggaaaataacctaacggatgggttacgatgagagtaggtacttacaaaggatatgtaattgcggtgtttctcagggacgaacattgcccgcctcatgtacatgtccggggaaagggctgggatgcgcgctttcgtttcagcttcctgaatgggcgcgtggaattgtgggacgtggacccgcaacggtgccggccaccggtcgccgttctggaaggcattcgtcaggcgctgctgcagccgcattatctggcgcgggcacgcaggatctggtggaacaacctgcaaacggtttgcctggaaaaccattcctgggattgggaagccgctgaagtgataccgggtctggtgatccggcgaggtgtctctgtaatcgccagtgcccggcacgatgtggcagggccgcgaacaattttgaatctggtcagggtgccggatcccgtggagattgagttatgacagtcgtgaaagccaaggtctatcccgatgtaccgctcaccgaggccgatgtcgacaaggccctggcacgcgggcgcaagttgaaacgcttgtacgccagcgccagctccgtcagccatgaagatggctgcatctgcatcggtttcagtgacggcagccgcgttatgttgccggttgccggtcttgcggagttcgaaggattttccagtgaggacttcgagcaactggaagtcgggtttggcggcaaggcgttgtgctgtgaaccacgagacctgcatgtgtcgatctctggcctggtgtccaccagcccgcccttgatggccctggctgccagcatggtggcttcgcgcaacgggcgcaaaagcagcaccgccaaatcggccgccgcccgtgccaacggcaagaagggcgggcggccacgcaaaaagcccgaggagggttagcggcgggtcaacaatacccctgattccatatggtgcgtccacggaaactggtcaaacatcgcacattgggtgatgcgatgggtgtcatgcagttgcgcaatattcgccgccaacgtctccggattgcaggagatgtagaggatgttgtcgaagcgtcgggtcagttcgcaggtgtccgggtccatgccggcgcggggcggatcgacgaacacgctaccgaattcgtagcttttcaggtcgatgccgtgcaggcggcggaacggccgtacttcattcagcgcttcggtgagttcttcggcggacaggcgcaccagggtgacgttatccaccgcgttttcatcgaggttgctcagggcagcattgactgacgtcttgctgatttcggtggccagcactttgcgtacgcgtgtcgccaacggcagcgtgaagttaccgttgccgcagtacagctccagcaaatcatccgggcgatcacccagagcctcaaaggcccaattgagcattttctggttcacggtgccgttgggctgcgtgaacgcgccttcgggttggcggtagctgaaggtgcgcccgccgacatcgagtttttccaccacgtagtcgtggccgatgacatcgcgcttgcccttggagcggccgatgatgctcacgttcaagtcagcggccagcttgttcgcggcagtgtgccaatgctcgtccagcgggcggtgatagcacagggtaatcatcgcgtcgccggccagcgtggtcaggaactccacctggaacagcttgtggctcagcgccgcgctggtttgccaggcggccttgagttgcggcatcagttggttgatacgctggctggcaatcgggaattcttcgatcaggatcggcgtgcgcttgtcgtcctgggagaacattgcgtaatggcgttcgccaccttcgcgccacaggcggaattccgcgcgcaggcggaagttctgcagcggcgagtcgaagacttgcggttcgggtgcgtcgaacggtgccagcaggtcacgcaagcgcgtgaccttgtcttgcagttgagcggtgtagcttgcggcgtcaaaagtcatgcgttgaaccagcccagcttgatcacgaacagaatcgacagaatcaccagtgccgggttcagctcacggtagcggcccgaaagcagcttgatggcggtccaggcgatgaaaccgaaggcgatgccgttggcgatggagtaagtgaacggcatcgccagggcggtgatcaccaccggcgctgcaacagtgatgtcatcccagtcgatttccgccaggccggaggtcatcagcacggctacgaacagcaatgcaggcgcagtggcgaaggccggaacactggctgccagcggcgagaaaaacagcgccagcagaaacaggatagcgaccacgatagcggtcaaaccggtacggccaccggcgctcacgcccgcagcggattcgatgtagctggtggtggtcgaggtgcccagcaacgagccagccatggcggcggtgctgtcggcgatcagcgcacggcccattttcggcatgtggccgtccttgcccatcaggccggcgcgcttggcaacgccgatcaaggtgccggagttgtcgaacaggtccacgaacaggaaggcgaagatcacgctgaccaggccgatgtccagcgcgcctttgatatccagctgcaggaaggtcggggccagggacggtggcatggacgtcacgccgccgaacggggtaacgcccagtgcgatggagacgatggtcaccgcgaggatgccgatcaataccgcgccacgcacggccagggcttccagtgcaacgatcagtacgaagccgagggtagccaggatcggcgccggttgtttcaggtcgcccaggcccaccatggtggccgggttgctgaccacgatgccggcgttatgcaaggcgatcagcgccaggaacaggccgataccggcggcaatcgccgagcgcagcggcagcggaatgctgttgatgatccactcgcggatacggaagatcgacagcaggaagaacagcactgccgaaatgaacaccgcgcccagcgccacttgccaggtgtggcccatgtgcagcacgacggtgtaggtaaaaaaggcgttcaggcccatgcccggtgcgagggcgatcgggtagttggcgatcaggcccattacggtcgaaccgatggcggccgccaggcaggtcgcaacgaacactgcgcccttgtccatgccggtctcgccgaggatgctcgggttcacgaacagaatgtaggccatggccaggaacgtggtgatccccgcgagaatctcggtgcgcacgttggtgttgtgtgctttgagttgaaacagcttttccagcatgccggctccctgtgacgctatcttgcgtcgttatttgttgacctctaagtcaaagcacaaactgcgccaagcgcctgtggtttcagagaggatcggaaaaagcggcgcatcataccagcagccgaggccatgtggcgcacggggttggttttgtaggccatggccttgaggcatactgcgccgacgttcaattcagggtcatcgacagcatgaaaaaagccaacgcgtggagtctagctctgatcgccagtgtcagcctgtggctcggtgcagcaccggcgtggggcgccactgcaccgcccttgagcgaggtacgtgtgttcaaggtcgagtcggccggttgcagcgaaaccattccggagcgtgcagaaagtactcaaatgtgcacgcaccgcgggctcaccaaagtctcggtgatggaagtcggcctgggcaaaagccccatggggcgcttcaacggcgctgagttgaatgggcaacgcaccccggtgtgccaggtcggcaacatcagccaggcctgcagcggcgcaggcacggtgatgggctacatctatgtgtttgacgtgaatgtccaggactcaggctggtttgactacagcaacacctcgatcaccggtccgcagaataccttgcagacgctgctcaacatccgctgatcaatccccttgaacgctcataacaccgggaagtcgtagccctgagacggcgattttcctgaacgccgcggcggtacaccaacccgtgaggtgtttatgagcgcaactcccaatggcgcggcggccacaccgttcgtcagccacccgatacgcctgacccttaacggccaggaacgccaactggacgtgctgccctggaccacgctgctcgacctgttgcgcgaacaactggacctggtcggcagcaaaaaaggctgcgaccacggccaatgcggcgcctgcaccgtattacgcgatggcaagcgagtgaatgcctgcctgaccctggcggtgatgtgcgacggcgccgacctgaccaccatcgaaggcctggccgcaggtgacgtgctgcacccgatgcagcaagccttcatcaagcatgacgcctttcagtgcggctattgcacgcccggccagatctgttccgccgtcggcctggccaatgaaggccgcgcgacggacaccgcgcaaatccaggaactgatgagcggcaacctctgccgttgcggggcctacagcaatatccgcgatgccattgaagacgtcgtgctgggaggtgaccaatgaaccccttccagtacagcaagccggccgatgtgcaggaggccgtgcacctgagcagtgccgcctcgcactttattgccggcggcaccaacctgctggacctgatgaaagaaaacatcagccggcccgaacacctgatcgatatcacgggcctgccgctgcggggcgttgaagcaaccgctgacggcggggtcatgattggtgcgctggtgagcaacgccgacctggcctggcacccgttgatcgaaaggcgttatccgttactgtcgcaagcgattcttgccggagcctcaccgcaactgcgcaacatggccagcaccggcggcaacctgttgcagcgcacccggtgctactacttttatgacgccacggtgccgtgcaacaaacgcgagcctggcagcggttgcccggcgcgcacggggttgaatcgtatccacgcgatcctcggcgccagcgaacagtgcgtggcaacgcatccctcggacatgtgcgtagccctgtctgcactgaacgcgcgggtgcatgtggaaggacggggcggcgcgcgtgttatcgaatttgctgacttccaccggttgcccgccgatacaccgcagcgtgataaccaattggccgatgatgagctgattacggccatcgaactgcccgccgaccatttggcccgccacagccactacctgaaaatccgcgaccgcgcctcctacgcttttgccctggtgtccgtcgccgctgcgctggaactggacggtgacaccatcatcgacgcacgcctggccctgggcggtgtggcccacaaaccctggcgtgaccgcgcggtggaagcctcgctgattggccagaacgtcagccgcgaaaccttcagcaacgctgccgacgccctgttgcaggacgccgaaccgctggagcacaacggcttcaaaatcaagctcgcacgtcgcgggattattcgtgccctgagcgacgccgccgtcgcgggagaacatccatgaccgctatcggcaaaccgttggaccgggtcgacggtctgctcaaggtcaccggccaggcgcggtatgccggtgaatttcccgagcagggcttgctccatggcagcgtggtctccagcactgtcgccaaaggccgcatcatcagcattgatgcttcaaaagcgctggcgttgccgggtgtcgtcatggtgctcgaccacctcaaccggcccaaactggccagctacgatgaggccttcgccgacgccgatgcagccgacggctcgccctttcgcccgctgtataacgaccgcgtgctctacagcggccagcccctggccttggtgattgccgacaaccttgagttggcgcggcacgccggctcgctggtggaaatcgagtacgacagcgaagcctttgaaaccgacttgctggcgatgcaggaacaggcgcacccgtcgccccagaccccgcccgcgccacgcggcaacttccaggccgaatgggccgccgccgccgtcagcctcgatctgcactacagcacccccatcgagcaccataaccccatggaaccgcacgccagtaccgtgctgtatcagccggacggcaccctgcatatccacgacaaaacccaaggcccgcagaactgccaggcctatgtgcaaaaagtctttggcctggacaaaagtcaggtgcggatcttcgccgccttcgtcggcggcgccttcggctcaggcctgcgcccgcaataccaactgccactggcggtgatggcggcattggcgctcaagcgttcggtgcgcgtgaccctgacgcgtcaacaaatgttcaccttcggctaccgcccgcgcactttgcagcgcttgcagatgggcgctgctgccaatggtcgcctgctcgccttggggcacacggcggttggccagacctcacgctttgaagacttcagtgaacacgtggtcgagtggagcggcatgctctatcactgcgacaacgtgcaactcacttacaagctggtaccactggatgtgttcacgccgctggacatgcgcgcgcccggggccgcgctgggcgtgattggcctggaatgcgccatggacgagctcgcttgcgccctgggcatggacccggtacagctgcgtttgatcaactacgccgagtgcaaccagaccgaaaacaaaccctggtcgagcaaagccctgcgcgagtgctacagcgaaggcgccgaacggttcggctggaaccagcgcaaccctgaaccgcgcagcatgcgtgatggccgccagttgatcggctggggcatggccggcggggtgtgggaggccttgcagatgaaggccagtgccaaagcgagcattgatgcgcagggcaaactgactgtgagcagcgccaccaccgatatcggcaccggcacttacacggtcatgacccagattgcggcgcaggcgagtggtgtggcggttgaaaacgtagtcttcctgctcggcgattcctcattacccacggcgccgttgcaaggcggctcgtttaccgtgtcgtccgtcggcaccgctgtgcagcaagcctgcgaagcgttgaccgggaaactgttggctatcgcgcggcagacttacccggtattcaaggacgccgaatcggtgcgtttcgaagacggccaattgcatagcggtgacgtgagtgtgtcgttggcacagttggtcaaggacagtggtgaagccgccctggaagtgcaggtagacagcgagcctgacaaaaaacgtaagggttacgccacggccacgcactcggcggtgttcgtcgaagttcgcgtggatgaagacctgggcacgatcaaggtcagccgggtggtcagcgcgattgcggccgggcgcgtggtcaacccgaagatggcccgcagccagatcctcggtggcgtggtgtggggcattggcatggccttgcacgaggaaacccagatcgaccatcaactgggccgctacatgaaccacagcctggccgagtaccacatcccggtaaatgccgatatcggcgaaatcgaggtggtatttgttgaagaacatgacgagatcgtcaatgccttgggttccaagggcgtgggtgagattggcattgtcggcgtggccgcggcggtggccaatgcgatttaccatgccaccggaaagcgggtgagggactttccgatcacgctggacaaggtgctgtaacccgatctttaaagcaatgaagatcagctgtgggagctggcttgcctgcgatagcggtgggccagcccctcacctgttaactgatacatcgccatcgcgggcaagcccgctcccacatttttcgacatcaattcaggcttttgactcttccaccggcacatgcatccgatcgcggttggccaggcttgggaacagtttgatccacaccccggtcaccaccagcgtaccgatcccgcccatgaccacggcaggcacggtgccaaaccagtgggcagtaatgccggattcaaattcgcccaactgattcgatgcgccgataaacaggccgttgaccgcactgactcgcccgcgcatttcatccggcgtctccaactgcacgaaggacgcacggatcaccatgctgatcatgtccgccgcgcccagcactaccagcacgcctaaggaaaacaggaacgaggtcgacaggccgaaggcaatggtagccacgccaaacacgccgacggcggtgaacatcacccggcccacatggcggtccaccgagaaccgcgccagccacaacgacatcagcaacgcgcccactgccggtgccgagcgcagcaggcccaggccccaggcgtcggtcagcagaatgtccttggcaaacaccggcagcaatgcggtggcgccgcccagcagcacggcgaacaggtcgagggagatggcgccgaggatgtccgggcggctgcggatgaaacgaatgccggccagcagcgaatccagagtcgccttggctttgttcaggggcaactggcgcgctggaaggttgagggtcagcacgcaggcgatcaggtacagcgccacggtggggccatagacccacacgctgccaaaggcatagagcaagccgccgagggcgggcgcaacgatggtggccagttgctgcgccgattgtgaggacgccacggcgcggggaaataacgcgctcggcacaatgctcggcagcagcgcctgggtggtcggcatttcaaaggagcgcgccgcgcccagcaggaaggcgaggatgaagatcatttcacgtgtcacgctgccggtcaggccgccgatagccagcgacagggcaatcagcgcctgcacggtctggcagatggccgcaaccttgcgccgctcatagcggtcagccacatggccggtgtgcaacatgaacagcacgcgcggaacgaactccaccagcccgacgaggcccaggtccagcacgttgccggtcagttggtagaggttccagccgatggccacggtgagcatctggaagccgctggcggtgaagatgcgcgccagccagaacgcgatgaaggggcggtggtgacgcaacagcaacgcgggttcactaggcatcgggaattctggtcagggccggggggagcgtcgagattatcattaagttgtaacagatagttgcaacaactgagctgaggcagtctgtcacgcggcaaaggaccacacggccttcgtccgaaaatgggactactctttcagcaatgcttgatccagatcaaaaccggccccgggattgttctggcggcccgaaaggccagattccccacgtggctggttaaaaaagaaacgaatttgaattcgccacactccatatccgtgggggcagtgggtgcaggctcccagccagcagccggtattacctgacagaggaagacttatgttcggtttggaggcgctagatctcgcccgaattcaattcgcgttcaccatctctttccacatcctgttcccggcgatcaccatcggcctggccagttacctcgcggtgctggaaggcttgtggctcaagacgcacaacgatacctaccgtgacctctaccatttctggtcgaagatctttgccgtcaacttcggcatgggtgtggtctccgggttggtcatggcttatcagttcggcaccaactggagccgtttctcggacttcgccggcgccgtcaccgggccgcttctgacgtacgaagtgctcacggctttcttcctcgaggcgggtttcctcggggtcatgctgttcggctggaacaaggtggggcgcaagctgcacttttttgccacggtgatggtggccgtgggtacgttgatctcaacgttctggatcctgtcgtccaacagctggatgcagacgccccagggctttgaaatcgtcgacggccgcgtgatcccgaccgattggttcgccgtggtcttcaacccatcgttcccttatcgcctggcgcacatggccacggcggccttcgtggccaccgcgttcttcgtcggctcctcggcggcctggcatctgctgcgcggcaaggacaacccggcgattcgcaccatgttgtcgatggcgatgtggatggctttgatcgtcgcgcctatccaggcggtgatcggcgacttccacggcctcaataccctcaagcaccagccggcgaaaatcgccgccatagaaggccactgggaaaatatcggtaacgaaccgacgccgctgatcctgtttggctggccggacatgaaggccgagaagaccaagtacgcggtggaaatcccctacctgggcagcctgatcctgacccattccctggacaagcaggtgccggcgctcaaggagttcccgcctgaggaccgccccaactcgaccatcgtgttctggtcgttccgggtcatggtcggcctgggcttcctgatgatcttcaccggtttgttcagcctgtggctgcgccggggcgacaagatgtacacgtccaagccgttcctctacctggcgctgtggatgggcccgtccggcctgatcgcgattctcgccggctggttcaccaccgaaatcggccgccagccgtgggtggtctacggcttgatgcgcacggcggatgcgtcctccgggcatagcctggcgcagatgacgatcacgctggtgttgttcgtggtggtgtacttcgcgctgttcggtgccgggttgggctacatgatgcgcctggtgcgcaaaggcccgcagacccatgaaggcagcgagccgacccacggtggccctggccagaaacgcacgccggcccgtccgttgtccgccgccgatgatggcagcgatgacgacagcacccacatccagcacaaggggaattgagatgggtattgatcttccgctgatctgggccgtgatcatcatcttcggcatcatgatgtacgtggtcatggacggcttcgacctcggtatcggcatcctctttccgtttatcccgggcaaggtcgaccgtgacgtgatgatgaacaccgtcgcgccggtctgggacggtaatgaaacctggctggtactcggtggcgcggcgttgttcggcgcgttcccgctggcctactcggtggtgctgtcggcgttgtacctgccgctgatcctgatgctgatcgggctgatcttccgtggcgtggcgttcgagttccgcttcaaggccaaggacgacaagcgccatctgtgggacaaggcgtttattggtggctccattgcggcgacgttcttccagggcgtggctctgggggcgttcatcgatggtatcccggtggtcaatcgccagtttgccggtggctcgctggactgggccacgccattcacgatgttctgcggtgttgcgctggtggtcgcctacgccttgctcggttgcacttggctgatcatgaaaaccgaaggcaagttgcaggagcagatgcacaacctggcgcggccattagcctttgtggtgttggcggtgatcggtatcgtcagcctgtggacgccactggcgcacccggaaatcgcctcacgctggttcaccttgcccaacctgttctggttcctgcctgtgccgatcctggtgctggtgaccatgtacgggctgatccgcgccgtggcgcgtaatgcgcattacacgccgttcctgttgacgctggtgttgatcttcctgggttacagcggcctggggatcagcctgtggccaaacatcattccgccatccgtgtcgatctgggacgccgccgcaccgccgcaaagccagggcttcatgctggtgggcacgctgttcatcattccgttcatcctgggctacaccttctggagctactacgtgttccgcggcaaggtcacccacgaagacggttatcactaggagggtcgttccatggctggcaaacctacgttgcaagagattgaacaggccgagaaacagccgctgtggcggcgcctggggtggctggcgatgatctggaccggcagcgtgctggcgctgttcgtggtggccagcctgatgcgcatgttcatgaatgccgccggcctgaccacccactgacatcccgctccgggcctttcggtccggctttcaaccctgccttttgcgagaaaggcagggttttttatttgcgcgctttgaggatcacgaatttgggcgtggtagcgacttgctcgacgccacggaacaaccgcgccagcttggtgtgatagcccaaatgacggttgccgacgatgtaaagggcaccaccgaccaccaggctttcccgcgcctgctggaacatgcgccaggccaggaagtcacccaccacctgctgctggtgaaatggcgggttgcacagcaccacgtccagcgactgtgggtcctggccggccaggccatcgccggcacgtatcacgacatcgcgatcagccagtgcggcctgccagttctcggccgccgattgcaccgccatataggactcatccaccagcgtgtactgcgcgtccgggttttgcagcgcgctggcgattgccaatacgccattgccgcagccgaggtccgctacgcgagcgctgccgaggtttttcggcaaatgtggaaggaaggcgcgggtgccgatgtccagcccttcgcggcagaacacattggcatggttcaacagttcgatggctggcgcgtcgaggctgtagcgggtggggtagggcgacacggcgacagggcgatctgtcacggtggcgatcagcaatcgggcttttttgactgcaagcgaggcctgcatcgggccgatgtagcgctccagcagttcacccgccgcccgtggcagatgcttgatcatcgccccggcaatcacctcggcgcccggcgccaactgcccttgcaggcgaatcagctgttcttcgagcaaggccagggtcttcggtacgcggatcagcacccggtcgaacggcccggtgggcacaaggttcgcggggatgaacggtaccgcgtcaaacgcttttgcgttgcgggtgaggtttttttccaggccctgggcggcgagaaacgaatcgccgctggacgtgacctgcactttgccttcaaggctcgccgccagcgcaccgaaactgtcattgagcaccagcacgcgggttgtggcgtctggctgctggctcgccagatggctgagcaggtactcatcggcggcgtcgaaggcttgcagcggatcattgtgttgctctggctggcggatcagatcgagctgggcgaaggggctgtcaagcaggggcatggcgggggaggctctgggtcatcgatgggtgttcggtgtaggcgggtagctggccgaaccgtctgagtgaactgcgaggctgcgcctgtagggcggcttcaacactcagaattggcggtaaatgttacttttttttcgaagggattacatgcggtgtttatgcgtcagtcaaacagcccttcttttgatgcacgcagaaccgcggcaatcttgctgttgactcccaacttctgcatggcccggcctatgtgaaaacctacggttcgcggtgtaatcgacaaaatgtcgcccacttcttctgctgtcttgcccatcgccgaccattttagaatctctgtttcacgtggcgttaatttgcagcaaaggctgacgctgggtgtgtctgcaaaattctgtgccactaccgcatgcatcgcgtggcagagccacaacacctgccccgccttttcgtacagttcttcaggagttacggcgcctttgctgcgccccagggtcagcatactgaagactccccggaaatcgtggaccgattgggtccagcccagatgcactccaaaggactgggccaaatcccataagttaggtgccgcactgaaggcattttcatcccagacaataggaaaaacactgtgtttgcagtggaccactatcgggtcgccattgaagaaatgtgcttgcttgtaaagggcgttccactctgaggggtaattgtcgaattgaatcggttcagtttgattattaggtagttgagaactcatcttgaaggaacagaattggaagccgagctcataggttttgttgacgaccatttcaaaaacagtgtttacctcgctctcgccttccagtttggggacccgtgtattgcgccagttgagcatcggtgactctccataggtttctccgtgacttgggtacgtcctcatcccccaaagctgcacgaaaaagagtgtaggacacggcttacggaacgggattaaattttaattattaaactgttgggtttaatcaattttttgccgcacggttagttgaactgttggagcagaaacggtgttttttcacgacttatgagtgacttgaagcgtctgtaacgtttagcgggcgatagtgatgtatcacttgatagatgagcacttcgcgggctaatagccaattgattagaatagttgtcataaggccactatgcagcctgccgttgatgtcactacaaaccaccggtgtttgtgccagcgactttgggcgacactgtggcacctgtagatcggagcccatcatgacggccagtgctgagaaatttacccgccagaccctgctcgacgtgcaatcgctgacccccagcctgtttaccttgcgcaccacgcgcgacgcgggctttcggtttaccgccgggcaattcgtacgtctgggtgtgaccaaagcggatggcagtactgtgtggcgcgcctattccattgtgtcttcaccgtttgacgagcacctggatttcttctccatcgttgttccgggcggcgagttcaccagtgagctgagtcgcttgaacgtcggcgatacgttgatggtggagcgccaggccacgggttatctaacgctgagccggtttgtggatgggcgtgatttgtggctcttgggcacggggacgggggtggcgcccttcctgtcgatcctgcaggactttgaggtctgggagaaattcgagcgtatcgtgctggtctacagcgcccgcgaggccaaggagttggcgtaccagtcgctgataaaggaactgggcgagcgcgaatacctggccgagtacgcgcacaaactcacctacctgccgatcgtcacccgcgaacagcacccaggcgcgttgaacgggcgcattactacgctgatcgagaatggcgagctggagcgcgccgccggcgttgcgctgaccccggaacactcgcgggtgttgatctgcggcaacccgcagatggtcgacgacacccgccagttgctcaagcaacgcgatatgcaactgagcctgagccgacgccccgggcaagtggcggtggaaaactactggtaataaaaaaggcgcccctgcgggcgcctttctttcaggccggcttggattaaagcggcttgtcgttctgggccttgagcaggtcgcgaatctcgcccagcagcagttcttccttggtcggcgtcggcggcaagcttggggccacggcctcttcgcgtttcaggcggttgatggccttcacgcccatgaagatcgcgaatgcaacgatcacaaagtcgatgacgctctgaatgaatttgccatacgccagaacgaccgccgggacgttgccctgcgcggccttgagcgttatcgccaggtccccgaagtccacgccgccgatcaacaggccgatgggcggcatcaccacgtcgcctacaaaggaggaaacaattttgccgaaggcggcgccgatgatgataccgacggccatatcgaccacattgcctttgaccgcgaaggccttgaactcactgatcacgcccataagttattccttgttacagatgagaagggtggaggtcagtgtaagtcagtcgtagagggcttgcgcgacacaaccgttaacactgttaatttttatcgacacattaaatcgcaaatagtttgcaaagtgccaccaatcgcgcgcgaaatacgcgggatttcagcggcttaccacactattttctttatcgggctggtactgcttttctatttatcttctgactcgcaggtcactagcctctggcaagcacgaatgaatgtgcataaaaaaaccagaggacacctcgatgaataccccaatcagccgcaggccagtgtcggcgcgtcacgcgctggcactggtcaccgccagcctgctttccctctccgtgcaggccgccaacctgacccgtgataacggcgccgccgtcggcgataaccagaactcgcaaacggccggcgccaacggcccggtactgttgcaggacgtgcagcttattcagaagctgcagcgctttgatcgtgagcgtatcccggagcgcgtcgtacacgcccgtggtactggcgcccatggcacctttaccgtcactgacaacctcagcgacctgaccaaagccaaagtcttcgcggccggcgaggccaccccagtgtttgtgcgtttctctgccgtggtgcatggcaaccactccccggaaaccctgcgtgacccacgcggctttgccaccaagttctataccgccgaaggtaactgggacctggtcggcaacaacttcccgacgttctttattcgcgatgccattaagttcccggacatggtccacgcgtttaaacccgacccgcgcactaacctggatgacgactcccggcgtttcgactttttctcccatgtaccagagtcggcacggacgctgaccgagttgtactcggattccggcacgcctgccagttaccgggaaatggacggcaatggcgtgcacgcctacaagttggtcaacgccaagggcgaagtgcactacgtcaagtttcattggaagagtttgcaaggcatcaagaaccttgatccgaaacaagtggccgaggtgcaggggcgtgactacagccatatgaccaatgacttggtaactcacatcaacaagggcgacttccccaagtgggacctctatgtgcaagtgcttaaacctgaggacttggtcaagtttgatttcgacccgctggatgccaccaagatctggccaaatgtgccggagcgcaaagttgggcagatggtgttgaaccgcaacccggccaatgtgttccaggaaaccgagcaagttgccatggctccggccaacctcgtgccgggcatcgagccttcggaagaccgtctgctgcaaggccgggtgttttcctacgctgacacgcaaatgtaccgcctcgggccgaacgccctgcaactgccgatcaacgcccctcgggtgaccgtcaacaacggtaaccaggacggcgtcatgaatttcggcaaaaccagcaccggcgtgaactatcagccaagccgcctgttgccacgggaagagccgcaaaccgcgcgctacagccagtcggcactgtcggggagcacccagcaagcgaagatccagcgcgagcagaacttcaagcaggccggagatctgtaccgctcattcaacaagaaggagcgtcaggacctgatcgacaacttcggcggctcgctggcgagcactgacgacgagagcaagcacatcatcctgtcgttcctttacaaggcagacccggagtacggcaccggcgtgaccaaagtggccaaaggtgacttggcacgggtcaaggcactggcagaaaaactgactgattaactgttggttacgatcggtgcccggaacagggcaccgatcccgttcaggagaaaaccatgcgaatttctatcggtttactgatggccatgctggcctttgtcgcccatgccgagcaacctgacccgaccgccctcaaggcacaactgcaggattactactttgatgccgcccgccgtggcgatatcgacatgctcaataccttcatcgagtccggttacagccttgatacccgggacgacaagggttacaccgcgctgatcctcgctgcctatcacggccagggtccgtttgtggaacgcttgctcaacgccggcgccgacgcctgtgtgcaagacaaccgcggaaatacggcgttgatgggcgcgatcttcaagggcgagctgaaaatcgcccagcgcctgctcgcaacccgctgcaaccccgaccagcgcaacggcgccgggcaaaccgcggccatgtacgcagggctgttcaagcgtgtcgagttgcttgatgaactgaaagccaaaggcgccgacctcaacgccgaagacccgaacggcaacagcgcttcacgattggccaacggtgaaatacggaccccaacgccgcgctgagctatcatcgcggtttttgggttggaggttctcaaatggcaaaggccaagcgcatgtacggctgcacggagtgcggcgcgacctttccaaaatgggccggccagtgcaccgagtgcggtgcgtggaacaccctgactgaaaccatgatcgaaagcggcggcgctgcggcccccacggggcgtgccggctggaccgggcagcaggcgcagatcaaaaccctggcagaggtcagcgtcgaagaaatcccgcgcttctccaccgcctccggcgaactggaccgggtactcggcggcggcctggtcgacggctcggtggtgctgatcgggggcgaccccggtatcggcaaatccacgatcctgctgcaaaccttgtgcagcatcgccagccgcatgccggcgctgtatgtcacgggcgaagagtcccagcaacaagtggccatgcgcgcccgtcgcctgggcttgccccaggaccagctgcgggtgatgaccgaaacctgcatcgaaagcatcatcgccacggcgcgcatcgaaaagcccaaggtgatggtgatcgactccatccagacgattttcaccgaacaactgcaatcggcaccgggtggcgtgtcccaggtgcgcgaaagtgcggcattgctggtgcgatacgccaagcagagcggcacggcaatcttcctcgtcggccatgtgaccaaagaaggcgcgttggcggggccgcgcgtgcttgagcatatggtcgacaccgtgctgtatttcgaaggtgagtccgatgggcgtctgcgcttgctgcgggcggtgaagaaccgcttcggcgcggtgaacgaactgggtgtgtttgccatgactgaccgagggttgaaagaagtctccaacccgtcggcgatttttctcacgcgcgcccaggaagaagtcccgggcagcgtggtgatggcgacgtgggaaggcacccggccgatgctggtggaagtgcaggcgttggtggatgacagccatttggccaacccgcgtcgtgtgacccttggcctggaccagaatcgtctggcgatgctgctggcggtgctgcaccgtcacggcggcattcccacgcatgaccaggacgtgtttctcaacgtggtgggtggggtcaaggtgctggaaaccgcgtccgacctggcgttgatggcagcggtgatgtccagcctgcgcaataaaccgctgccccatgacttgttggtgttcggtgaagtcggcctgtcgggcgaggtgcgcccggtgccaagcggccaggaacgcttgaaagaagcggccaagcacggcttcaagcgcgcgatcgtacccaagggcaacgcgccgaaggaatcgccgccggggataaaaattatcggggtcacgcgcctggagcaggcgctggatgccttgttcgagtaatcagcaacgctgcaaaaccagtgtgggagcgggcttgtgtgggagctggcttgcctgcgatagcatcacctcggtctactttaaacactgaggtgtctgcatcccagcggtgcggcggtccgacaagcccgctcccacattttgtgtgtgttgactgctagagctccagcaacgcacccagctcgcggtgcagctcatcttcatcacccaggttcaattcgatcagccgccgcaaatggctgatcgaatccaggtcgatgtgctcgcacacaaaccccagttgcccatgatcgtcatgggccagcttcacctgcatcttgatgtgcgcctgcgggtccagccggatatccacggtaaataggcgcttgccattacctcgccagtcgtcggggcgttccaccagcaagcccttgagcgacacatccaccagttgcaccggccaattccaggtgtcctgggcaatggtcgtccaggcatcgaaggcgattcgccgaaaacggcggcgatcagacggttgctcggtcatggtgaaaccctctgtgaatagaaggattgtagccttgcgccattacccggcttttatttctgatttttttacagttgcgaggctctagaccaacgtaggggggtggcctttaaggccaacagcgctaaactcgggctggctgtcctttctgtccaccctggctggaatataaaaatgaaaaataataatagcctgctacgccacctaccctggctggtgctggcaatcgtaggagcgtgcgccctgggcgtagtggccttgcgccgcggcgaggcgatcaacgccttgtggattgtggtcgctgctgtggccatctacctggttgcgtaccgttactacagtctgttcatcgctaatcatgtgatgcagctcgatccacggcgggccacccccgcagtgctcaacaatgacggtctggactatgtgccgaccaacaaacacatccttttcggtcaccactttgcggcgattgccggtgcaggccccctggtcggccctgtactggcggcgcaaatgggttacctgcccggcaccttgtggctgattgccggggtggtgctggccggtgcggtgcaggacttcatggtcctgttcctgtccacccgtcgcaacggccgttccctgggggacatggttcgcgaagagatgggccgcatcccggggaccatcgcgctcttcggctgcttcctgatcatgatcatcatcctcgcagtgctggcgctgatcgtggtcaaggccctggccgagagcccgtggggcatcttcaccgtgatggcaaccatcccgattgcgatgttcatgggcgtgtacatgcgctacatccgcccgggccgcatcggtgagatctcgatcatcggcgtgctgttgctgctgggttcgatctggctgggcgggcaaatcgccgctgacccggtatgggccaaagcgttctccttcaccggcgtccagattacctggatgctggtgggctatggtttcgtcgctgcggtactgccggtgtggctgatcctcgcaccgcgcgactacctctctacgttcctgaaaatcggcaccatcattgccctggcaatcggcatcctggtcaccatgccagagctgaaaatgccggccctgacccaattcatcgacggcaccggcccggtgtggaagggcggtctgttcccgttcctgtttatcaccattgcctgtggcgcggtctcgggtttccacgcgctgatctcttcgggcaccacacccaagctgctggataacgaagtcaactcgcgctacatcggttacggcgcgatgctgatggaatccttcgtggcgatcatggcgatggttgccgcttcggtgatcgagccaggtgtgtacttcgccatgaacagcccggctgcggtggtcggtgccgacgtggtaacagttgcgcaaaccgtcagcagctggggctttgccattaccccggaagcgctgacggccgtggcccatgacatcggtgaaaccaccatcctggcccgtgccggtggtgcaccgacgttggcggtggggatcgcgcagattctgcacagtgtgctgccgggtgaaaacaccatggcgttctggtaccactttgcgatcctgttcgaagcgctgttcatcctgacggcggttgacgccggcacccgtgccggtcgcttcatgctccaggatttgctcggctcctttgtgccgtcgctcaagcgtaccgagtcatggaccgccaacctgattgcaaccgcagggtgcgtggcgatgtggggttacttgctgtaccagggcgtgatcgacccactgggcggcatcaacaccttgtggccgctgttcggcatctccaaccagatgctggccggtatcgcactgatgctcgccacggtggtgctgatcaaaatgaaacgccagcgctacatctgggtgaccatgctgccggctgtctggctgctgatctgcaccgtgaccgcaggcttcatcaagctgttcgacgccaaccctgcgatcggcttcctgtcgctggccaagaagtacagcgatgccctggccaacggccagattctcgcgccggccaagagtatcgaccagatgcaacacgtgatctggaacgcctacaccaacgcaacgctgaccgcgctgttcctgttcgtggtgttcagcatcctgttctatgcgctcaaggtcggcgtcgccgcctggggcaacaaagagcgtacggataaggaagccccgttccaggccgtgccggacgcgtaatagagggttgcaaccatgttcaatgacatcagtcgcctcggtaaatacctcggtcaggccgcgcgcctgatggtcggcatgcccgactacgatacctacgtcgagcatatgcaaaccaaacacccggacaagccgatgatggactacaaggcgttcttccgggaacgccaggaggctcgttacggcggcaagggtgggcccaaatgctgttgagttaacgcaatatccctgtgggagcgggctggtgtgggagctggcttgcctgcgatggcatcactgcggtgtaactgatacaccgaggtgtttgcatcgcaggcaagccagctcacacataagcccgctcccacatttgtttctgtgttccttgaaggagaatatttttgtcctctcccatccccgtcaccatcctcagcggcttcctcggcgccggcaaaaccaccttgctgcgccacctgctcaaagccgagcacggcctcaaaatcgccgtgatcgaaaacgaattcagtgacgccggtatcgacacccagctgttgggtgccgagccggtgcaggtcatgaccctgtccaacggctgcgtgtgttgcaccatccacaccgacctgaccaaagccctgtacctgctgctcgaacgcctggacagcggtgaaatcgccttcgatcgcctggtgatcgagaccactggcgtggccgaccctgcgccggtggcccagacctttttcatcgacgaagaactgcgcgagcgctacatcctcgacggcatcatcacgctggtggacgccgcccacgccgagcatcacctgacccagaccatcgcccaggcccagatcggctttgccgaccgcctgttggtgagcaagcgcgacctggtggacgaagccactttcgacgccctcagccaacgcctgacgcggatcaaccgccgcgcacccattcgagtggtggaccacggcaacatcgacctggccgaactgctcgacgtgcgcggtttcaacctcaacgccggcatgagtctgcgcccggtgagtgctgcaccgtccattgaccgcatctccagcctggtgctgcgcaccgaccagccgctggatattgaccgtctcagcgagttcatgaacgagttgctggaagatcacggcaaacaactgctgcgctacaagggtgtgctgaacattgccggggaagatcggcgcatggtgttccagggtgtgctcaagctttacggctttgattgggataccgaatgggcagagggcgaggcacgggaaagtgtgattgtgtttattgccgatgagctaccggagcagaaaattcgcaacggctttgccaaggtttaccaatcctgaattgaaatacggtccactgtgggagctggcttgcctgcgatggcggtggatcagctaatgatgtgccagctgtcagatcgctttcgcaggcaagccagctcccacatttgattgcatttcagtttgagaaagcagtgttttcaggcacaaaaaagcccggctcttcagccgggctttttattcaagcaactgcaatcaagcgccgtataccggcagctttttgcagatggccttgaccttctcacggaccgcgtcgatcacggcttcgttgttcaggtcggccaggatgtcgcagatccagccagccagttccttgcactctgcttctttaaagccgcgagtggtcacagccggtgtgccgaagcgcaggccggaagtgacgaatggggaacgtgggtcgttcggcacggagttcttgttcacggtgatgaacgctttgcccagggcagcgtcagcatctttaccggaaatgtcctgcttgatcagcgacagcaggaacaggtggttttcagtaccgccggacaccacgtcaaaaccgcgctcgatgaacacgctcgccatggtctgggcgttttttaccacttgttgctggtaagccttgaactcaggctgcagcgcttccttgaagcagatcgctttggcggcgatcacgtgctccagcgggccgccctgggcgcccgggaatacggcggagttcagcttcttctcgatgtcggcgttggcgcgcgccaggatcaggccgccacgtggaccgcgcagggtcttgtgcgtggtggtagtcacgacgtcagcgaaaggcaccgggttcgggtagacgccagcggcgaccagaccggctacgtgagccatgtcgacgaacaggtaggcaccgactttgtcagcgatttcgcggaagcgcgggaagtccaggatctgcgagtaggcagagaaaccggccacgatcatttttggcttgtgctcaaccgccagacgctcgacttcgtcgtagtcgatcaggccgttggcatcgatgccgtattgaacggcgttgtacagcttgccggaggaggaaacgctggcgccgtgggtcaggtgaccaccgtgggccaggctcatgcccagaatggtgtcgccgccttgcagcagggccaggtacacggcgctgttggcttgggaaccggcgtgcggctggacgttggcgtaatcggcgccgaacagctcctttgcacggtcgatggccaactgctcaaccacgtcgacgtactcacaaccaccgtagtagcgcttgcccgggtagccttcggcgtacttgttggtcagaaccgaaccttgagcctccatgacggcggggctggtgtagttttccgaagcgatcagttcaatgtgctcttcctggcgcacggcttcttgctgcatggcagcgaagagatcggcgtcgtacttggcaatagtcaaatcacggctgaacatggcggtcctcaaggatcgggggcagaaaaggagggcattctaacccaatgggttttagatggcatatgaaaggacatcatgtcgcggacaagcgggattcacttagggatgagcggtgcctgtactggcgccatcgcaggcaagccagctcccacactttgatcgggttcacacattcaaaatgtgggagctggcttgcctgcgatgaggccagtagcttcatagcagggcttcagtcgaacatgaacagcgcatcattgctgaactgcgcctcaaaccggttcgccggcatcggccgcccgaagagatacccctgaacctcatcgcacccatgctccctcaggaaatccagctgctcatgggtttccacaccttcggcgatcactgccaggttgaggctgtgggccatggcgataatcgcgcgggcgatctgtgcgtcctgctcgccggacggcaggccgtcgacgaaggtgcggtcgattttcagcacgtcgatggggaactgcttgaggtagttcagcgacgaataacccgtgccgaagtcatccaccgcaatgctcagcccgaggtttttcaggctggcgaggatctgcatggcttcgttgacttcgcgcatcaggatactttcggtcaactccagctccaggcacgccggcggcaggccggtgtccttgaggatggtggcgatgcgctcgcccaattggccgtccgaaaactgccgtgccgagatgttcaccgagactttcggcacgcgcactttgttctggtgccaggtcttgagctggcggcaggcttcggccagcacccagtcgcctacgtccaccaccaggcccagttcttcgagcactggaatgaaatcccccggcggcaccagcccacggcgcgggtggcgccagcgcagcagggcttcggcaccggtcaggcgcttgccgtcgccgctgaactgcggctggtaatacaacacgaattcgttctggtccagggcgtggcgcaggtcgctttccagctccaggcgttccaaagcgctggcgttcatgtcggcctggtagaactggaagttgttcttgccgcgctccttggcgtgatacatcgcggtgtcggcgtttttcatcagctggctcagctcattgccgtcttgcgggctcagggcgatgccgatactggcggtcacaaagaactcgcggccttccagcacgaacggtttcaccaggctggccagaatctgttcggccacgtgaatcgcacggttcagcgccatgtcacggttgacccgcggttgcagcagcaaggtgaattcgtcgccgcccatgcgtgccacggtgtcgtcttcggccacacagcccagcaggcgcgtggccatttccttgagcatgcggtcgccggcggcgtggccgagggagtcgttgatcggcttgaagcggtcgaggtcgaggaacatcagcaccacccacgacttttgccgctcggctgactgcagcgcggtgtgcaggcggtcctggaacagcgtgcggttaggcaggtgggtcagggcgtcgtagtaagccaggcggtggatgcgctgttcgctggccttgcgctcgctgatatcactgaagaaacacacgtagctggccaagtcgccttcatcgtcaaacacggcggtaatgccgacccaggccgggtaatgctcgccattgcggcgtttgagccacacttcgccttcccaggtgctgtgctggtgcagttgcttgagcacgtaacgcaggtgggcttcctgttgctcgtccacggtgagcatgttcggcaactggtcgagcacgtcgctgacggcgtagccgctgacccggctgaaggcctcgttggcctgcacgatgtagccggccgggtcagtgatcaggatcgccgaggtcgagtgctcgaacaccgtggccgccatgcgcaggtctttctcggcacggcgctgctggctgatatcgcggcccacccccaggatgccttcgaacgcgccgtgctcatcccacaccagcaccacacgcagttcgatcggcactttgcggccatcggcgcgcaggcagtcgaacaggaacagttgggtctgcacctcatcgcgcagccggttgagcgcgacggggtcgcccagggcacggctgacgtgttccgcgaggctgtagatgcccgtcagttgctgcgggttggcaatgatcgactgccagccgtttttgaacacccagtccacgtcatagcccagcacggtattgacggaggggctgacgtagttgagcgccagctggctgtcggtcgagcagatcacgtcgctgatgctttcggccagcatgcggtaacgctgctcgctgtcgcgcagtgattcgctggcttcgatctggtcggtcacgtccttggccacgccgatgatccgcgtgaccacggccgtcttgtcccgggccagggcctgctcgcggatgtcgaagcggcgccattggttattgcgatggcgaaagcgcagttggcattgcagctgggtcgcatagccggcctggcgctgctgttggcgcaggtcgtggtaaaactcggcgtcctcggggtgcagcaggatctcccagaagtactcgcccatttgctgcagttcggccttgttgtagcccagggtatggcccaaatggtggttgctgaaaatcatgcgctggctgatcacgtcctgcacatacaggtgatcgggcacggtgcgcaccacgtccgaccagaaactctcacgctccaccagcgacaattcgatcagcttgcggctggtgatatcgctgatgctgaggatcaccgccttgaagtcgtcctgctgctccggcaggcgcatgaccagccacaggtattgctcattgccgctgacatcattgagttggatctccagctccaactgtttctgttgggtcagcacggcttccagtacttgatagccgatggctgttgcgttgctcgggttatcatcgatcaggcgctcccaggcttcgtcacacgagctcacattcagcaggcgcacggctacctggttgacctcggtgacgcgcaactccttgagcagttgccgacgctcttgcgggctggtgtgcagccactcctgcaactgctcgcgggtttgcatcctggctttggcgaagaaagtcctcagccccgacaggtcaagcacgcacagggccacgccggtgccttcaaaaatatcctgatagcgccgccggccttcgtgcacctggcgttggcgtcggcgcatgttcagcagcacgattaccgggatcagcgaaaaggccaggcccagtaggcatttgccgataaatgccggcagcagctgttccagcaccgcgctgcggtcgaacatgccgcgcaattgccaatcgcttttgctcaggggcgtgaccagcacgcttttgttcaattcatcgggggtcaatgccgatgcccattgcgccggcatcccgttgtctcggctgaccacacggtggttcaggcggttttcgatggcccacatcgggcggctgccctggccgtcctggcgcgtaaggttggccaggtaattgggcgcaaggcgcaacgcccagtacattttcgagccgccgctggattgttgcagcaacaagtagatgagggtgccgtcggggttgttgctcaggtaatacggctgggagcggctgcgttgcaccagttcttcaagccagacgcggtcctggctgtctttggcgctgtcactgatcatcgcgccgctgggggcgagcagggcgacgctgcgcagttccggcagggagcgctgcaaggtacgcatcagggcctgttgctgttcgtcgtctcgcggcggctcgaccatcggcagcaggttgagtgcgattttcgcgctcagggccatgttcaggctgatctgttcagccaggtcggcgctgtaattgatggtgtattgctgttggttcttctggttttgctgcaactggtcgagcagttgccagaacaacaaggcgagcagcatcaggacaagcgtcgccaatgcgcctttgagggtgccgtgcaggggcgctcccggcgcaatatgagcggcgcgcaggggagtgggcggcgtgactttggacaagctgtgatcctgcggtttggctggactggcgcgcgacgtgcactataagccggacgcccggagggcggctagcatgccttgagttgtggcaaagtgccagccccgcctggctggactgaccaggcgcattcaggtagctttgccggttacgcgggggcgttccagccccagacattcaggctttttccgcacgcaggcattgatgatagtcaaaggcccgcgccgcgcatggcctggcacgggcttcgcccgcttaattcatcagtcactgacgctaggttcaccatggctcaatacgtcttcaccatgcatcggctgggaaaagttgttccgccgaagcgggaaatcctgaaaaacatttcgctgtccttcttcccaggcgccaagatcggcgtgctcggcctcaacggttcgggtaagtccacgctgctgaaaatcatggccggcgtcgacaccgaattcgaaggcgaagcccgcccgatgccggaactgaacatcggttacctgccgcaagagccgatcctggacccgaccaagaccgtgcgcgaagtggttgaagaagccgtcgccgtgatcaagaacgcccaggcccgcctggacgaggtctacgcggcttacgctgaagaagatgctgacttcgacaaactggccgctgaacaggccaagctcgaagccatcctgcaagcgggcgacggtcacaacctggagcgccagctggaagtcgccgccgacgcgctgcgcctgccggcgtgggacgcgaaggtcgagttcctgtccggtggtgaaaaacgccgcgtggccctgtgccgcctgctgctgtcggcccccgacatgctgctgctcgacgaaccgaccaaccacctggacgccgactctgtggcttggctggaacacttccttcacgatttcccgggcaccgtggtagcgatcacgcacgaccggtacttcctggacaacgtggccggctggatcctcgagctggaccgtggtgccggtatcccttacgagggcaactactccggttggctggaagccaagtccgaccgtctggccgccgaatccaagcagcaatcggctcacgaaaaagccatgaaggaagaactggagtgggtgcgcaaaggcgccaaggcccgccagtccaaatccaaggcccgtctgcaacgctttgaagaaatgcagtcgcaggaattccagaaacgttcggaaaccaacgagatctacatcccggccggcccgcgcctgggcgacaaggtcatcgaattcaagaacgttaccaaaggctatggcgaccgtgtgttgatcgataacctgtcgttctccatgccaaaaggcgcgatcgtcggcgttatcggtggtaacggtgcgggtaagtccacgctgttccgcatgctgatgggcaaggaaaccccggattcgggcagcatcgagatcggcgaaaccgtgcagcttgcttgcgttgatcagagccgtgacgacctcgacggcagcaagacggtgttccagcaggtttccgacggctccgaccagatccgcatcggcaactatgaaatcccgtcgcgcacctacgtcggccgtttcaacttcaagggtggcgaccagcagaagttcgtcaaggacctgtccggtggtgagcgcggtcgcttgcacctggccctgaccctgaaagagggcggcaacgtattgctgctcgacgaaccgtccaacgacctcgacgttgaaaccctgcgttccctggaagaagccctgctggacttcccgggcgccgccattgtgatctctcacgaccggtggttccttgaccgcgtcgcgacccacatcctggcgtacgaagatgactcccaggctgtcttctttgaaggcaactacaccgagtacgaagcggaccgtaaaaagcgcttgggcgatgctgcagcccagccgcaccgcgtgcgacacaaaaaactggcctgattcgggttggtggtttgaaaaagcggagccttcgggctccgttttttttgcatcttttcaggacgaccgaggtgtattcatcgcaggcaagccagctcccacagttgaccgcattccaatattagaaatcgatcaaatgtgggagctggcttgcctgcgatggctgtttaactgttggtgcattcttaaagttgaaatcccgtttctggtgcaaaaaatgggatttatttatatctattgcaccatttaaattcacaaaggcgacattttgcgcttttcaggtgcggcatgaattgctaaggtccggctcaatctcccttaaaaacaatcaaattgccgagacttctcatggttgaatctgtcgaatctttcctttctcgtctcaagaaacgcgacccggaccagccggaattccaccaggccgtagaagaagtcctgcgcagcctgtggccctttcttgaagccaaccctcactacgtggcatcgggcattctggagcgcatctgcgaaccggagcgcgccattaccttccgggtgtcgtgggtggatgatcacggcaaggttcaggtcaatcgcgggttccgtatccagatgaacagcgccatcggcccctacaagggtggcctgcgcttccacccctcggtgaacctgggtgtgctgaaattcctcgccttcgagcagaccttcaaaaactccctgacctcgttgcccatgggcggcggcaaaggcggctcggacttcgaccccaagggcaagagcgacgccgaagtgatgcgtttttgccaggccttcatgagtgagctgtaccggcatatcggtgctgacgtggacgtgccggcaggcgatattggtgtgggtgcccgtgagatcggcttcctgttcggccagtacaagcgtctgagcaaccagttcacctccgtgctgaccggcaagggcatgacctacggcggcagcctgatccgccctgaggctaccggcttcggctgtgtgtatttcgccgaggagatgctcaagcgcaatggccaacgggtcgaaggcaagcgcgtggccatttccggttccggcaacgtcgcacaatacgcggcgcgcaaggtcatggatttgggtggcaaggtgatttccctgtccgattccgaaggtaccctgtacgccgaaagtggtttgaccgaggagcaatggtcggcgctgctggagctgaaaaacgtgcaacgcgggcgcatcagtgaattggccgtgcgttttggcctggagttccgcaaaggccaaaccccttggacgttggcctgcgatatcgcgctgccctgcgcgacccaaaacgaactggatgccgacgccgcccgtaccttgctgcgcaacggctgtgtttgcgtggccgaaggcgccaacatgccgaccacccttgaggcggtggatatctttatcgaggccggcattctgttcgcaccgggcaaagcctccaacgccggcggtgtggccgtaagtggcctggaaatgtcgcagaacgccatgcgcttgctgtggaccgctggcgaagtcgacagcaagctgcacgccatcatgcagtcgatccaccatgcctgcgtgcactacggtgaagaaaacggccgggtcaactacgtgaagggcgcgaatatcgcgggttttgtgaaagtcgccgatgcgatgctggcccaaggcatcgtctaagcgtcgggctctacgcgcagtacttcgatcaactgatcaccgacggggcgtttccacagcacctcgtcgcctacctgggccccgagcaacgcgcgacccaagggcgagccccaattgatcaggccgacgctggcgtcggcttggtcttcaccgaccaactgaatgcgctgctgctcatcgtgctcattggcaaaggtcacccaactgccgatctgcaccttgtcactcgaggtggccggggccacgacctgcgcgctctgtacgcgctggttgaaataacgcagatcccgctcaaggtccgcttggcgttgtttatcgtccttggcggactcgaggctgtattcctgctgcaactgcgcaaccttggcctgcaattgcgccaagccttgcgcagtcacgcggttgggctgctcactgatctgacgctccaccggctgatcggcctgggcagcggcgttgtcctcattcacaaaagcacggctcatgacgttctccctctatggagttagggccatgttcgctgcgctttagtttcgatggatgtctgaaagcgacctattgcgaacgatacgccctggccgcgtcacgatccttctcctgctgccaggcacgttcgcggtcatcccagtggttatccttgtagtcacgcaactcctcgttctcgcgcatggccttgcactgacggaaaccgtcttcccagccttcagcgtattcgcggtctttcagataacgcggcacattcttgcgaaactccccactgatcaccccggcggcctggcggccactgctgcaaccgtcgtcaaaaccatcggcaaaggcgggcggatagcccttggcgatcaaatcctgatgggtggactggcaacctgacaaccacactacagcgcacagcattaccgcagaccgccacatggcgtactcccttcgccgttttacggctgatggggaaagtctagatagggatttgtcggggaggcgtgaaagagaggtgagaaaggtgttgagcgtgcaggccgtgcgatgtttcagactaaacacaaaaccaaatgtgggagctggcttgcctgcgatggcggtgtatcagtaatggccaggctgactgatacaccgccatcgcaggcaagccagctcccacattttggaactttgatcggctttgggtcagtagtgataccacttcacttcaagcagtacttcattcacgggtgtggaaaggtggctgtattcgcgctgtgcactcaggcgcaggcccaggttacgcgagagttcccactgctggttcaggctgatgctgcgccgcacttcgccgttggtgaagaagtcccctttggcttccaggctcagattgcccagcgggtttttccacagtacgccggtgttaaagccagcggcgggcgagatcgcttcgctgaagtcgttgttgtgttccacgcgtacggtgccgagggcgaagccgagcatgtcgtcggtcagttgccaggtgccgccggcgccgccgttgacgtgggcgacgagggtttcgtcgtcgtgtttgcccggcacgcgttccaagccgccggtgacttgccaggaccatggctgcaacagcgcgttacgcggcgtcagggagcggatggtggccaagtccagttgctgcagttgccagtggttgccttcgtactggcgcagtttcatttgcaggatttcgatctgcgcgcccaaggggaagccttcggcgttgtcgttgaggtcgtggtaggccatgcgcaggccgtattcgccgaaggtcttgttgcctcgggtgccgatgccggcttgccaggtgcgcgactcgtggccgttttcaggcagaccggggcgttcaatcttcaggtcgggtggcgggttctggttgattgcgcgcagcagttcgaaactgcgttgggagcgttcggtgtcgcgctccaggccgttggcgcggtagcggcccaggcggtaggcggcgtcgatgatcagcgcctggcggtctttggcgatagccttgaaggctggcgcttgcaactgttgggtgtcgtcgctgactttcagcacccattgctgctcgtcgctgttgagcggcttggcgcgctccagcaactcgcgttcgcgggacgggcggtaatcaattttctccaccaggcctgcgtcttttaccgctttgacggtgtcggtcgggatggcggtcagcgggaattgctcggtcaggcgcaggccggggcgggccacttgcagcaattcgagcaggcggtaggagcagttttcatcgaagaagaagtagtcgaactggatctgcttgagctcccacacgtgctcgaccatacgcttggtctcgacctcggtgaggttcaggcggtattcccacaggtcgcggttctcgaggctacggtattcggagagtttttcctggtacggcaccagggcgaaaaggccggggtagccgcccatcaggcctttccaggcgtagagaatgctattgtccgagccttcgatgtaggcgccgaagttgatcgcgtagctgagcagggcggtcttgtcgcgctgcacgtcagcctggtcgatacgcagcagggtgtggccgaacatcgacgacgggctgttgaggtaggccgccggaaagatcatcaccgcgctgtggggcgcgacgtccttgaaccattgggtgaattccttgcactccagcgccggaaggtcggtcaggtgcagttggtccttgagccagcgcgtgcgggcggggtaaacgcattggacgtgcttttcacccaggcttgccggagcataaagcgcttctacggtggccttgagttcagcgtccgggtggtgtgcaccatcgggcgcgagaaagaatttcttgtcgctgacatagctgcgccagccactgattttgccggcttcataatggcccaaagacagccagaacgggtcgttggccagttgctgcaaacgttgatcatcaatatgcggggccgcgtacagcggggcgcaggcgaagagtgccagccaggcaaagcgtttgagcataagggcaacttaagtcggaaaaagtgagacccaaaggggaggcgggtccaaaaacaaggcccgcgcctcgaaaggcgcgggcgggtcgagcttaagcctgggtggcgtacttcgccaggcgggaatcgcttttcagtacagccagggtgttgttgtgcacgtcgtcggcggtcacgtcagccttgctgaagatctgctggaagtgctcgtgggtcacggccgcgaagtgttcgcgatcttccggtgcaacgcccagcaccaccgcgtaggtggtcagcgcttcgccgttgcctttggccatgtcttcagacagctcgttcatcatgccattcatggcaatccaggacttgccgccgtaggtcagggcgctgttggtgctgcaaccattggtgcccgaggtcatgccgaacgtggcgttacccgaggtgccgttggtggtggaggccaggaagtgagccggagtgccgcgctggccttcgaacaacatgttgccccaaccgcagttcgggccacctggtgcttctgccattgcattgagggagacgacggtgaagagagtaccaagaaggatccgtttcatagctttgttctctttgtgtgcaaaccaatggacaagggttcaggcgcgtcgcagcgccctaggggccagttatttagtccaacccgcgcagtttggagtttaggcacgttccgggggttccgttattttttataaaacaatcagacttatcgcgatttatttgtagggcgcatcccgtgtctatgctttcccacaggctcgccttgccagagcgcgcaagcgagagccagaatgccgttatctgccccgcctgatgtaaggaagcccgatgcctgatcctgttgctgccagcttgcgtctagcgcctgaagcgctgactcgccctttctccgctgaacagttcagcttctcgaccaccaatgatttggagccctttcgcggtgtgcttggccaggaacgcgcagttgaagcgttgcagtttggtgtggccatgccacgccccggttacaacgtgtttgtcatgggcgagcccggtaccggccgcttttcgttcgtcaaacgctacctgaaagccgaaggcaaacgcctgcagaccccggcggactgggtctacgtcaacaattttgatgagccgcgcgaaccgcgtgccctggaattgccgggcggcgctgcggcggcgtttatcgccgatatcaacgggctggtcgacaacctggtcgccaccttcccggcggtcttcgaacaccccacttatcaacagcgcaaaagcgccatcgaccgcgccttcaaccagcgttacgacaaggccctggacgtgatcgagcgtctggccctggaaaaagacgtggcgctgtaccgcgacagctccaacatcgcctttaccccgatgctcgacggcaaggcgctggacgaggccgagttttcgcaactgccggaagccgaccgtgaacgtttccacacggacatttccgagctggaagaacgccttaacgaagaactggcgagcctgccgcagtggaagcgtgagtccaacaaccaactgcgccaattcaacgaagaaaccatcaccctggccctgcagccgttgctcgcgccgctgtcggaaaaatacgcagaaaatgctgcggtgtgcggttacctgcaagccatgcaggtgtatttgctgaaaaccgtggtcgagcaattggtcgacgactccaagaccgacgcccaggcgcgcaagctgcttgaggagcaatactgcccgagcctggtggttggccatccggtcaacggcggcgcgccggtggtgtttgaaccgcacccgacctacgacaacctgttcggccgtatcgaatacagcaccgaccagggcgcgctttacaccacttaccgccagttgcgaccgggtgccttgcaccgtgccaacggtgggttcctgattcttgaagccgagaaaatgctcggcgaaccgtttgtgtgggacgcgctcaagcgttccctgcaatcgcgcaagctgaagatggaatcgccgctgggcgaactgggccgcctggcgaccgtgaccctgaacccgcagatgattccgttgcaggtcaaagtcatcatcatcggctcgcgccagttgtattacgcgttgcaggacgccgatccggatttccaggagatgttccgcgttctggtggatttcgacgaagacatcccgatggtcgacgagagcctggagcagttcgcccagttgctcaaaacccgcacctcggaagaaggcatggcgccgctgacgtcggatgcggtggcgcggttggccacgtacagtgcacggctggctgagcatcagggccgtttgtcggcgcgtattggtgacttgttccaactggtcagcgaggcggatttcattcgccacctggccggcgacgagatgaccgatgccggccatatcgaacgtgcgctcaaggccaaggccacgcgtaccgggcgggtgtcggcgcggatcctcgacgacatgctcgccggggtcatcctcatcgataccgcaggtgcggcggtgggcaagtgcaacgggctgacggtgctcgaagtcggggattcggcgttcggcgtgccggcgcggatttctgccacggtgtacccgggcggcagcggcattgtggacatcgagcgtgaggttaacctcggccaaccgattcactccaagggggtgatgatcctcacgggctacctgggcagccgttatgcccaggaattcccgctggcgatctcggcgagtatcgcgctggaacagtcctacggttacgtagacggcgacagtgcatcgctcggcgaggcctgcaccttgatctcggccctatcgaaaacgccgctcaagcagtgtttcgccatcaccggctcgatcaaccagtttggtgaggtgcaggcggtgggcggggtcaacgagaagatcgagggcttcttccgcctttgcgaggctcgtgggttgaccggtgaacagggcgcgatcattccccaggccaacgtcgccacgctgatgctcgacgagaaggtgctgcaggccgtacgggccgggcagttccatatctacgcggtgcgccaggccgacgaggcgctgagcctgctggtgggcgagccggccggtgagccggacgaggaagggcaattccccgaaggcacggtcaatgcccgcgtggtcgagcgcttgcgcgcgattgccgagatgatcagcgaggaagatttgaaggaggcggagaaggagttggcgcaggaggcgctggcggaagccaaaccaagctgattatgtgggagctggcttgtcgggtcgccgcatcgctgcgatagcggtgggcctgtcagcaacgatgtcggccttgagtcagtcatcgcaggcaagccagctcccacattcaatcagtgtgtatcgccaaaaaaatgactccagtctgaggggccagcgcccgttggtccctacaaccttggtttgtcgcggttttcttctattctcagttcaagggatatccaaaggagtcgctggatagaaacagcctcggccctgggttgaggttgaacaccgatctaccgagggtcgccgccatgccgcgcaacctttgccttacccgccaatgcctggggctggtcacccgtatcgaatgttccgttcgccctcttgccggggataacgggatgtggaccttgctgtttgccgccggaatgacgggtgaacagccttccaccgtcaagtcccaaggcccgtttcacgggcctttcgtggcggaaaccattctgggctccatcgtcgacagcctgacgctgcatggctacgagttggcggacgacccgcagatctggtgcctgcacctgcaggcccacctgcggcagctcaatggcgagcgggtacacgcgagccgtgatacccaccactgagttttacttggtctctggcttgtccagcttgacctcgaagccgtattgcacggtgtcgaggtcggtgcgctggtagctttccagcgaagtcggctggccgtagaagtaatgcacgtcaaacagcgccgtgccgtactcctcggcgcggtggctgaccccgaggatttccttgaggtagttgccgctggcgtccctggcgtagaagcgccagctgtcggaggggaattccttctggtcgacgaccagtgcgttgtccttgagcgacaggcctttgggcagcttggccacgtcaatcgtggccttgttgatcgtggccaggaacagcggcaccgaacccaccacaaacgccggcgtttcggggaacaggttgaggtcgtacgtcagcgtgccgcttcccgcgttcagctcaaaggcttcggtgggtagctcaatgggctcgccgcgctcgcccttgtcgtctgccgtgaagaaggtgataggcgcgtcgctgttgttgcgctcggcgccgaccaggtcatcgttgaaggtgaaggggtggttaaacacgactttcgcggcactggcgtcctcagtcgactggctgatggtgacgctttttttcagctggtcctcggtcatcgccgcgtctttgagccagttggcgacgccgtcgtcatacaccgtgaccggcatcggcaggggttgcacggtattttgcaggctgttcttgtcgaagcgctgcaccggcaggtcgaggtctttgcgcgtgagcgtggcggtggagaagtcgaggacattgacctgcaggctgtcgatcacgccgttgaaatacaccttggcgtaatggctgctttgcttgtgctcgaaggctttttgctcgtcagtgagttgtttttcgaacgcatccgaccaggttttttgtttctgcatctcggctagctgtttttcatagaacgccacttgcgcagcgttttcgttgatcgagcctgagcgcgtcagaaattgcccggtgctgtcccgggcctgcaccagcagcgggttcggtgattcgtcgccgacttccggcgccagtggctcgctgttggtcagctcgatctcggcgtagtttttttccagcaacagcaggttgagggtgatgttgccctcggtgcgtttgtggccgacgtcttttttcatcaggtcgaaggtcagcaccttgcccggcgcgaccacctctaccgcgcctttaaggctgaccggttgcggctggctcttgttttcggtctcgatgtcgtcgatgaacgggtaggtgatggtcaggtcatcggggttggtcaggttggagctgctggggctgagctggatgcccgggtcggtttccgaccattccggctggaacgggatgaccttgttgttgctcaaggtcaccgactgccattccaggccgtgaggaaaggggaattgatccggggtgttgaaggtgaacgggaagaccggctgcaagtcggtcaggtagtcagagtgcgaggctttgcgcagcacgaacaggccgttgatgtaggtgtccaccaaggcctggggcgtggggtagtgcttgagcagggccagggtgtcttcgccgtattcggcttcgatgggcttgtcggcgagcttgacgcgggcgcgctcgagcaacagcagggagccgccgaggtcggcgatggcgtcgcgcagtttggggtcctggatgctgtccagcgactgctcgaacttggcggttttctcttcgagggtggcttgcttgggctcttctttgggggagcaaccgccactcatcagcaacatcgcacccaggccgatagtggccaaatgggatcgcacatccatcatctgagtttttcctgttcgacgtcatcgagccgatttgatgggctcgacactagcagaaaaatcttcttacagatgccgctcaggtcagttttctcgcggttacaggtgtttgtgagcggctggtatactcgcggccatttttagcagagctgtgtgagattcaatggaacgctttatcgaaaatacgatgtacgcctcacgctggctgctggcgccgatttacctggggctttccctgggcttgctgatcctggcgctgaagtttttccaggaaatcatccacgtcattcccaacgtgttcaccatgctggaagccgacgtgatcctgctgctcctgtcgttgatcgacatggcgctggtcggcggcctgctggtgatggtgatgatttccggctacgagaacttcgtctcgcagctggacatcgatgagagcaaggaaaagctcaactggctgggcaccatggactcgtcctcgttgaagatgaaggtggcggcctccatcgtggcgatctcgtccattcacctgctgcgcatcttcatggacgccaagaacgtcgatccgcagcatttgatgtggtacgtgatcatccacatgaccttcgtgatctcggcgttcgccatgggttacctggacaaagtcaccaagcactgatgcacggcgccagccttactgctcgacgaagaagtaaggctggcggccgattttcatttccttgatcacggtgaccttctcactcagctgttcggtacggtccagcaacgcgatgttgcccggcttggccgtgagaaaactgcgtagctgcgcttcggtttgcaggatcggcaagtaggcttgcaggtagaacacgctggccccggcaatgcgttcgttgggctggaataacaccacgtccttgccttcgttttgataggccttggcctggctgatcaccggcacgaacgactcacgtttatccgctttcggcgcaaaccagaacgcggccgtcatgtaactgacaatggccagggtgaaggcgccggcgatcacgccccggtgatagcgatacagccaaggcttgcgggttttcgcccattccagcaacaccccggcatattctgcggcgagtacagcggcggcgggggtgagcgccatcaggtaaaccacgcgtttactggaggccagggtcagcagggtgaactgcgccaccagccatacgctgaagaacaagtggtagcggttgcgcaccagggttttgcgaaagtgccacaggcccaggtacaccaggatattccagggcaggaaggcctcgggcagtttggcgatgtagtagtagatgggctcgtaatgcccggcttcgacaaaggagccgctgaagcgcccgacgctgttggtccacagcacttcggccacggactgcatcccgccgcgctggaacaggaaccccagccagatcagcagcggcaccaaggccagcaccgtgaacagcgccggcttgagccagtcgccgatgcgcacgcgtttatccatcacgctggtgctgagcaggtacacaaagatcacaatgcccggcatcgccaggcccagcacgcctttgctcagggtggcgatgaccatcccggcggtaaacaacgcccaggcccaggccgcggagccttggcggtctggccgcacggcttggtagaacgccagcagcgcggtggtcacgcccaggctgagcagcgagtcttcacccacgccgcgcacattgccccagtaactggccatggttgccagaatcagcgcggcgcagaacgccagggttttcggccgcccgaactggcgcagcatcccgtaaaacagcattacgctgaacaggccggcaaacgccgacgccaggcgcacggcccaggtggtgccgccaaacaggcggatggcaccggcatccagccataggctcaggggcggtttttccaggaagggttcctggaacaggcgcgggatcacccagtcattgtccaggtgcatggccatcgcgatcccggcgacacgggcctcggtggagccttgaagctcatgactaccgagggcgaagaagaacaggattccggcgagaaggagcagcagagaagcgggacgcgtcatggatctggctaccgaggcaagggaccgctcgggggaacggccgtggcaatcagctagtatctgtcagcatttctgaatatttcgtgaatgaatgtcagttttttgtaaggcgccgaaggcggagcctgccggccgattcggctggagattaccggcttaggccgcaagctatgctaggctggcgccatgcctagaatgaccaaatccgaactgaatgccgagatcatcgaccgtgccgccgggctgtttgccaagcatggtttcgcgcatacctcgcttcagcagatcgctgatgccgtgaattactccaaagccggtttgctgcaccacttcccgagcaagcaggcgttgtttgatgccgcgttgcgcacgggcctggagcacatgcaggtgctgatcgagcgcgtggagggccttgcgcctggcgttgagcgtgagcacgcagtgatcgagaacctggtggacttcacctttgcctggccgggtgtgtcggcgtttgccaaccggctggtggagggtgagcaaagtgaggtgcctgagctgatgcagatggcgttgctcgtctacgtcgcgctgggcatcgagctggccagtgtgtcccaggaacgcctggtacgtgtcaccagcgcactcaccgggttgggcgccacggccctggtggcggtgcgttcgggcttgcatcgcgagtggcgcccgctgattatccaggccgccatggatgcgctcggccaccacggcctcacaaccccctgaccatccccaaaagcctgtgactccacaccccgtgccgggcgcccggtgaggtggtgtcatccggtatcagtgcggtgaccagcaccacaccgagcacaatcatcagccacttacgcagccgggtcatagccgcaatggcagggtgtggatgattttcagtgcttcctatagtgccgcgagaggtcagtgccagcctgctgcgcgtgcgccggccttgtattcctctcaacgctgcgaacaaaagacccacaggtgtattccttgtttggaggtaggcgtgcgcaggccgacacgtgtcggggagggttgggattattctaccgaaatggttggtatgcaaccgaaatggtttaatcagaaactgctaactcgtctctaatgagaagtattatcatgtgcgccattcttaaacagcccgcgggatattgttctgatggcctcatcctcttcggcccattgtgttgtgggcgagctctacgcccagcatcacagctgggtggtgcagttgctgcggcgtaagctgggtgggcaggagcaggcgctggacctggcgcaagacacctttgtgcgcattctgagcagcaacaccgtgccggtctttcgcgagccgcgggcttatctcaccaccgtcgccagccgattgtgcgggcagtatttccgccgccaggcactggaacgggcttatgaacagtcgctgacgattcttgaaccggaacatatgccgtcgccggaaacacggctgctggtgctggaagccctggatgccgtcgggcaggtgctggacgggttgggaagcaaggtgcgcgaagtgttcctgctgtcacaactcgatggcctgacttatccacagatcgccgagcgcatggacctgaccgtgaacgtggtgcaaaaagccatgctcaaggcttatcgccattgttacctggcggtgtacggggcatgaaggacgcgctggaagaacgcgtgctggagcaggccttgcaatggattgtcaccctgcaatccggcaccagcggcgctgccgatcaatacgcgtgccagcagtggcgcaatgaacacccccagcatgaattggcctggcagcgccttgtcgggcttacccgcgagatgcgcgccagcacccaggcattgccggcgcccagcgcccggcaattattgcgtgcccgcagtacaccttcacggcgcaccgtgctcaagggctttgcgggtttgagtatcgccagtgccttggggttgagcgtacgcgagcgcgtgctgttgccggagctgttcagtgactatcacaccgccacgggcgagcggcggcgtgtgctgttggcgaacaccggcgagttgcaactggacacccgcaccgccgtcgatgtgcacggcaccgacctgacgctcagcctcggcaggctgttgctgaccaccggtgccaacggcgcgatggcgattcggacagacaatggctgggtgcgccccgccgcattgtcacggttgatcatcagccagggcttgcctcgccagcccggcacacaggtgcagatcctgtcgggcaatgcgtcggtcgagccgctgcacggggttggcctccacctgcttgccggccagcaagtgggctttgacagccgccagaatggccagccctccagcgtgccctcaaccgccgaagcctggactcaaggcctgctgattgccgagcgcatgccgctggctgaagtgctcgaacaacttgatcgctaccggcgcggcgtgctgcgctgcgatccctccgtggccgggctgcaggtctctggctcattctcgctggaccatcccgaagccagcctcgacctgctgacccaggtgctgcccgtgcgtgtgcagcgggtgttcggctacctggccacggtggtaccggcgtagctgcaaattactttccccgcgtgtggcagtttttcttatctcaagcatcaagacaggcaagacgctgaaaaagcgcgcccccaaccctttctcgacaggacagtctttatgctcagccgcgttactccgcttgcttgcgccttgcgcagcatcctctttggtttgtcggtcgcaaccgccagccatggcgctttcgccgatacatccacgcccgcccgtgaacattcccagccccaggcgtacgacatttcgccaggcagccttgaccgcgtgctgggcgctttcgggcagcaagcgggcgtgatgatcggcatcgactctgcgctggctgcaggcattcaaagcaagggcctgcagggcagtttttcagtggatgaaggcttggagcgcctgttgagcccggcgggcttgcaggctgagcacgcgtcgggcggttatcgcgtggtggccaagccagcctcgcaagacggcaaggtggaactgcaagccacgcaagtcagcgccaaccaactggggaccgtcaccgaaggcaccggctcctacacgccgggcaccatcgccactgccacacggctggtgctgacgccgagggaaacgccgcaatcgatctcggtggtcacacgccaggtgatggacgacttcggcctcaatgccatcgacgatgtgatgcgccacacaccgggcatcaccgtgtcgacctatgactccgagcgcaccaactactattcccgcgggttctccatcgagaacttccagtacgacggcattcccaccctgcgcgacgcccagtactcggccggccagaccctcaccgacatggcgatctacgaccgcgtcgaagtgctcaagggcgcgaccggcttgctcaccggcgcaggcggcccgggcggcaccatcaacctgatccgcaaaaaaccgaccgccgagttcaaaagcagcatcgaactgggcgcaggctcgtgggacaactaccgctcgcaggtcgacgtgagcggcccgctgaccgagaccggcaatgtgcgcggtcgcgcggtggcggcctatcaggacaaaaaatccttcctcgaccactattcgcgcaagaccaacgtgttctacggcatcctcgaagtcgacctgaccccggacaccttgctgacactgggcgccgactatcaggacagcgaccccaaaggctccagctggaccggcgcacgcacgatcttcgacgccaccggcaacaaactggacgtgccgcgctcgttcaacaatggccccaaatggggctcgtgggcgcagtacagcaacaccgtcttcgccaccctcgagcacgctttcagcaatggctgggtggccaaaggccaatacaaccatcaggtcaacggctatgacgcgcccctgggctacatctcccaggactcggccacggccagctcgatttatgcggccaaatatacgggcgacaccaccagtgacagcctcgatgtgtacgcgtcagggcctttcgagctgttcgggcgtgagcatgaactggtcattggccagtccgtggccacctcccactggaaagccaaggactaccgcaacccggtgtacgtcgacaattcgtatgacttctacaactggcatggcgaagccatcgagcccaactggggcagcccgtccaagatcaacgaccagaccacgcgccagaccggcacctacatcaccggccgcttcagcctgaccgacgagctgcacctgctgctcggcacccgggttgccaactatcaagtcaccggcaccagcgacaccaaagaaagcggcaaggtcgtgccctatgcgggactgacctatgacctcaatgaaaacttcacggcctacgccagctacaccgaaatcttcaaaccgcagacgcagtatcgtgaccgaaccagcacgatgcttgagcccgacgaaggtaaaaactacgagcttggcctcaaaagcgagttcttcgacggtcgcctgaacgccagcctcgcctacttcgaagttcacgaaaccaaccgcccggtcgccgacaccgcctggaactcccagccaggcgtcgattactcctacgtcggcaccaagagcaaaaccaaaggctacgaagccgaaatctccggcgaactcgcccccggctggcagttgcaggcgggctacacccacaaaatcgcccgcgacgacgacagcaacaagatctcgacctgggagccgcaagaccaagtcagcctctataccaattacaaactccagggcagcctcgacaaactcaccctcggcggcggcacccgttggcagagtgccggctggcaaaccgtacgcaactggggctacccgggcggcgggcgctccgaaaaattcacccaagacccctactggctggtggacgtgatggcgcgttaccagctcaccaaaaacctgtcggccgcgcttaacgtcaacaacctgttcgacaagaaatacttcaccaacatcgggttctatgactcggcgtattacggcgacccgcgcaatgtgatggtcaccacgcgctgggatttctgaagttcgaggccgggttgccgcaaggcgactcggcctttctggtttttagtgcggggacggttggcgggcggcctgcgtggtgagcacgcgctcgaccagcagttcgcccaaggcgatcaattgttggctggccagtagtttttgacggtgggaaccttcgagttcgaaagccaggtctgtggtcaaggcattcagcgaggcgagggtttcgctggcttggaccaagagggtttcgaggtcgatgttttcggcgacggtgaagaggctggttgggggattgggggtgatttttttcatggctgaaactccttgattgatggagtcgccagacatcgctgctaaacgaaaagggtggcgactgtacgcgggttagcagaccaggaatcaaggaacccagcgcacccgaaagtgccccacgcacagccgccataacgcgaaccagcagatgcataaagcatcgctcaaacgaatggtggctttgcaggccttgatattaaccgagctgctaaacccggtcgctgattttgcagcgacgcagggaggttagccgggtggggggagggcgaacagttcaccaacagcgcggcatcttgaaggaaaaatccgagggtaggctggttgggcttttcaaacaccagaaacaacaaagcccgcacttggcgggttttgtcgatgctttgaattggtgagccggggtaatctgaattgattatgtatgtgattgattttaaatgattaatatcggtttgttttttcgttggaatactttttggaatactaagatctatgcgctgagtcaaaccgagcgcgtcaatcgctttgatctgcttcccacggtttcggcaaaagatcgctgggcatagtgaaccgccttttcttttgagcccccattttcatcgtggtcagttgggcgtcgacttgagcgcaggtaggtacgttgtcattcgtctgcgggcttaaattcaccgcagctgattgctcaggttggagctcgtccgcaattgtggttgtggccggcacttggctgccatggagtgattcggggagaggagtatttgttcgttgctgttcctgggaggcttccgcaatcggtaacggcctcggtgcacctgagtacacttcggtcacttcgtgcacagtgtttacgtcgtcttccacagttgtctcagggtggcgggctgagtttgggaactctccgttatccctttcaccagtattgttcggtccctggaatgagtaattacgagctgctcgcgggacttgcttcgattgttgcgtttgtcgcttgcggatatgggctttgtaggcctttgtgataaggctttctagcaatgctgtggcgctccttccctggtcctcggccatttcactcaagtttgttttggctgacgtgttcagagtgaaggcgcacaccttcttgcctttcgcggaatcccgccggtccttttgccgccaggcagctttcatgtcttggaatatttcgcgtccatcgttccgacgctcaatctttgcaccgagctccagcatttctccatgtctcgcaaaatgcatcggggagccggcgcgattctctttatcgaaaaccttgaagcccttcgcccataagtaatccagggcccattgccgctgggtcccattctctgggtcaagccactctaagcccggtttccgtttacgccccattgttagccttctgaggattgtgaggttcgctcaatcatagccttttaacgtgggtttattcaattaagtacgaataccgttatgcagtcacgttaaaaatctttttttataaaaacagggtatatttatcgatataaatttaaatgagattgacgctgtgtttgttgatttattgctaaagccggtgtcaggtcttgggccgaatgcgaggtttttcctggcggctttcgcgatgcgctttggtggggaaggcgctgttttgcttacggtgaaggaattggcgaggcgtctgatgatctcgtcgcggctggtgacagaggtagtgcctgagttggcgagggacgaagcgttcctagtggtcaaagaggtgtcagttgggcgggggcggcccacacgtagctatgaaattgcacctgcgcttcaagaggttgagcgaagcaggccagagtccatcgcctcgctaactcatgggcctctcatcaggcacttgctgtcctgcccagatatccaggagtcggacagcattgtggaggttgctgtaggagagccggagcaggcagttggttacaagcagctacctgccaggaaaaaatcgaaccgactcagcgtcagtaatcgattgcttctggctgtgttgatgtgtcatgcggatgacctcggagttgttcgcagggttgggatgcccatgctcaagcagctcaccggcctggatgaggtcaagctgaaacccaggctgcgacgactggttcagctggggttcattcgtagttcggttgcgggggtgaccagttcgatttttgcggaggtcaaggtcagcacaacttattttctcaatttgaaccacccgcagctgaggctagaggaagactgctgtgcgtccatcgtgcttcacgagtatggagtcggtcgtcgggagactgtctctgccgcagctccggctgttgcactgcgtttcttccaggcgcttagggagcctgtttttgaagtgctctatctaaagttggctcgatatgtgtcgcacctgctgagccaccattggaatgagctgcgtttgccagaacgctcgtgggagttcgcgccgctgaagaatatgatctcggccgacttcaatcgaccgcaaggagatttcacgacaggcttggcgataggggagattgattggttggaggtcatcgaccattttcattggtttgtggtagcgcgggccgccaagatcaagtctcgacttgagggcacggtattgggcgaccttaaggattcgcgaatggaggtgataccttcccctgatcgagacgacggtagtcggatcactacgctgttgctgagacgggggccggtacctgtggccagttgcctggtcattagggatgcgcggtcaggcttctgtgagccattcaatggagagacgcagctaactgaggaagagcgctaccagtttggcttgcagactaatcccaagccgggttgggctggttaggtcatttttaaccgcctcttcagatcctctgagccaatagaggagcctgctcatgaggatcatccgcctgaaagaagtcatcgattcgaccggcctggcaaggtcgactatttacaagtacatcggggagggcaccttcccgaagccggtctcattgggggaccgttgtgtcggttgggttgaaagcgaggtgcacgactggattttgggaagaatcgaagagcgcgacttggctgagagcgctgcagcccgccccggccgcctgagtatggccagctagaaaccaccatttgcgccatgaccggttgatagctggtcatggcgcttatgccgctagggggaatcctttgttctcagctaactcccctaggatccaaatgggtcaatctctaggcaggcttggcaatgttgctccccattgccaagcctgatcgggatcgtccaccgtggcgtgaggtgcttctagttatatagctattaactatcaatcagtaacgatccaataggttgtctaactcagctacacaccacctcctcaagctagcgataggtcatcagttaaaaagtacaaagcgcacctacctgatatgcaaaccaccaatcaggtacgtcaccatgaccaagcgcaacacctacacctacctttcccagtccgacatcgccattcagattgaacgactcgtccaggccattgagcagcatgacagcccagcctttcggttcaggcaaacccgtgcaggttatgagcgagtagaggagacccggctctccaggtacttcactcacatccgccagatgatggacctgttcgatgaccgagttgaataccgctacagcgaacacctgcaagcgttcagggaggcttgtcaggacatcggactagaacctaacccttccggtcctgtgtgcttgaacaaagagagtacagcttacttggaccatcatcgcagcatgaacgtcttggtcgatcgtattcggcagttgactcgtgaaccgtggtatcgccggcggaaagatgacaggcgctatcaggtcaggcagcaggagggcaatgtcaccggttacgttgatgctttgcttgatcgctactcgcgaacgaacatcatccggattgatctctactaccgttctgaagctcaagccagattacgtgtcgaacaagtgttcgatgatttggactcgatgcttactaagcatgagcgtaaccctatcttcgaccacctcactggttacatctatgcggttgagcagggtgaggatcgtggctaccacatccatgctgcctacttcttcaatggcaacgaggtacgtggagacatctacaaagcccaacagattggtgagctttgggaccgtatcacaagggggcagggatgcttcaacagttgcaatcacgacaaggatcagtacggtgaacggtgcattctcggtgttgtacgacgagacgatctggatatccggaggcatgtccactatgcgatgcgctatctggtcaaaaatcaccagttgggtatgaaaccgttgcgaggtaagtgcctgcgtaaaggacagcttcggtgtccaatgcgatatgaccgcactacacaccctgattctgcacaaccataatactgtaaagggcagggcggcacttgaccgccctgcttcttggcgttgcgccactagacttccttaacttgccagcttgatcagcaaacgctggctccgaggcccctcgcgatcaccctcgagcttttgcgattgttctgaggcgatcatctacagccttgcgccacgcatccagcttcgcaatatcttgatccagttcatcgggctctggaatgggcagccttccaaccgccatagcggcatcgtgctcgaattttgagcttttagtcattccggtttcaatctctcgatagtcgtcgtcggtcacgatcacagacttgagccgttgagttgaaaccccctcgccaaaccgctgaacagcaccattaagtagaacttcctcgatacaccgctcccatgcaagacgcagctttccatagcaagcggcggtaaggtggcgatgctcgtcatcatttcccactttctgtgctttgcgaacctccaccagcatatctcttagtcgagccaggcgtcctttggtacccaaaacatcgaagggtaagtcttgggagtggacaccaaagccttgggctgttctgcggatgtagtttttggttagtgtgccagctagctcctcgattttttgctccagaatgcaaaggaagtagatgtcgtgtgtgaagacgatcacttgacgagtcagagactcgattgccaaacgctcagccacctcccaccggcgccggtggtcgagcgaagagaccggatcatcgaacacgatgccgccgcgtcccttgccaagtttgatctcagctaggaaggacgcgatggcaatcgcgcgctgttccccttcgcttagaattgccccaggtgcaccaccacctggcagttgcaagacaagcttgaattgcgtccggcctccaggcgattccggcttcattacgacctgtagctgatgcacctttagccgcttgagttcttcattaagggcgtcggccaactcctggctagccgttgtacgagaaagctcggtggactttctcgaaataccacgggcatcgaggctgtcgatgcagatttgcagcttgcgacaaatctcatgcttggctaaagcctccaaaacagcgtctttgacctctccgaggcgcacccgagcatcgaactcacgtttctcggcaaccatggcggcgcgtactgcctcatcagctgtggcttccagagccttcgcctgctcctgcaaaccttcaatgatgatggtcaaggcatgcagtggattggtcgatagtttcgtaatttcggcccatgggagatcagatgcagctgcccgtaacgtggatttctgtcggaggagcaggctgtcctgcatcgacgtgcattctgttgcaaggattggatcaatctcagtcagttcctcaatcagcgcatcgcggaacatcacatctagagcggcttgctggattgccctataggcagatgccgcgagctcgcgagcttgcttcgcagtctgctcggctttctgtttgatgaaggcatcaaattggacaagacgcgcggtcccttccgggcctaggacattctggcaaagcgggcaggcagcgccctctggaagaccagggaactcatggtcagggtgacaagtttgggcgaatgctcgggccgcttcgaagagagccttccactcctctccgccggtaccgatcagttgtccaggggtctgcttgaattcggttgaagccagttcagctgcggattttgccgttttggatttatcaatgagtgtttgaagttgggcgatcttatcgtcgtcaacaaaggctatcgcggctgcgatatgatccctcaatccattgagtcgtgtggctttctggcgcagcgcttgggccttctgcttcgggtcagcttccgacaaggtctttgtcaaaagagttagccggtcctgttcagcctcggtgacctgagccagtgcttcaatttgatctgctttggtcttggccggtataccaataagcaccattgcaactgccgtttgttccttcgtcagcgccacataagccgcgtcactcggagcgtttgccgtcttttcatgtgtggcacgaaccttgagtttgttgcatgcactggccaggccttccagtatgtccagcccatatggggcgtaggcgaagtcgccatggttgtcgatgtaagctcgggcgcagtgggtatcgaagatggaaatgtctgatagcggctcgggagcagccgctccatagcgccagggtaagtctgtggcaacaccatctatcatggtctcgaatacagcttgagctgcgccggcagtcttggggtcgaggttcgcattgggaaggataggttcgcgtcggtcccttgcgcggcacgcgtgcttgaataccctggagtagcccgacttaccggcgccgttctcaccatagatgacagtcaagcctgtcaatgcaattgggatactgccgccatgcgccaatgcgttgacatgtgccaactccttgatgccaaccaactgaacgattcgagctggatcggcaggtggggcgacctgagcgtcttgaagctttttgggtttacgaccttctgggtcaggaattccggcctctactttgaccagcgcatataagtcctcaagatcgactgcgctaagtgtccgatcctcatagagcctggcgactgcatcttgttgccaggctgagagccccttcgaccacgcgtggatctcttggataatggtcaccagccttcctccttgtttgcgagccttaccaaacccactagttgttgtgtcccctctaattacagcacctcatgctaatttgccaccataaaaagggtattcttgacctctagcacttcacggtgcgtattttttgccgcctctcctctgtccgtgccttgtgatgttcatccaaagggcactcgcattccggttttgtgaggatatctgatgatggagcggatcaaaatgatctgtatatgcaatttttataatttctatttgctggcgttgtgatcgtcatttatcctgcgttacacccctttatatgctggccaagccgtgactatcgattccctcgcgcaattgacgcaagctcagcgcgaccgcctcgcttacctagaattgcgtctgcggtttgtgggcgaggtgggacggcaggatctgatacagcgctttggcattcaaactgcagccgccactcgtgacctggccacctaccgtgagctggccggtagcaatatggcctacgaccgaagcagcaagatttatacgccggcgaagggttttcggccgctctttgaatattcagcggaaagggtattggcctggttggcggagggtttcggagatggcgagcctgctactagtgcgccgggaattccctgtgtgacgcctggtcgcctgattcagcctgacctggacagtctgggattagtaacacgagccatctatcatcgctgcccgcttcgggtggagtactccctggacagcggcaaaacccagcgggaaatcgtgcctttcgctttgatcgatacaggtctgcgctggcatgtacgcgcctacgaccgcaagcgtggagcgtttcaggactttgtgatcacccgcatccggcgagccaaattgcttctggactcacaggttgctgaacatgagcgacccgaacaagacgtccagtggacccggattgtggaggtggagctggtagcgcatccggatcaaccgcatccggatatcactgcgatggattacggtatgcgcgatggggtgctgcgcctacgcctgcgtggtgccactgccggttatgtactacgcaagtggagcatcgactgctcgccggatcaccgactgcgcggggcggaatacaacctttggctgaaagacccgctactgctctatggagtagaaacagcggcgctggcgccgggctatatcatgccgatggattgcagccagactttagaagaatcccaaacaaggtgagcattcatgcggcctttcattatctcgcagtatgtactgcaaaacacagggagctcccgtgtcacgactcactgatctgatcgccaaagcgaaggccgataacgcccagatgggcgccgacttggagcgtgaattcaaggttctgtcctcgcgcttgccatttggcctgaactttgagcgccacagtccggaagctgtagaactaccattgcgcccgatccgcaagggggacaaggtgcgcgtgctgcccccgcgcggcgcgactaagaaaggtgaccagcgcctatggcaggtcaaggccatccacaaggttaagaagatggccgacttggaactgccgggggctgctgaggccgaaacgcaatcggtggcactggatgaactggtagttgtggccgagttccgcgacacgatctatcccggcttaatcagcacgggcaaggtggagcgcggtggcgataagccgttccatactgttatcaatggcgagaactatcacgtgctgaaggcgcttaccttcacacaccgcggcaaggtagacgtcatctacatcgacccaccatacaacacgggcgcaaaggattggaaatataacaacgactatgtagagggcgacgacctataccgtcacagtaaatggttggcgatgatggagcgccgcttgctcttggcgaaggagttgttgaatccagctgattctgtactgattgccaccatcgacgaaaaggaatatctgcgacttgggttgctgttggagcaggtatttcctgaggcgcggattcagatggtgagttctgttatcaaccccaaaggtgttccacgagatggattttcccgtgtggacgaatacattttcgtcgcacaatttggttcatcggaaattgttggtgatatcaaagaaggaagtggcggcacagaagttcgttggcgtggcttgacgagaacgggcgcaaacggcatccgaagtaagtcccccggcgcgttctatccaatttacttcagccaggacggcaagattgcagatgtcggcgacgccctgctattagagcaagaagcaagctccgtgccgccccgaaaagggctgattgctgtgtggcctacacctcgtcccgatggtgaagatggacgatggtcggtcgttcccgagcgattgcgcgaaatgatcaagatgggggcagtcagagttggacgtgtaaaacccgatgaggggcaattcccaatcttctaccttacatccaaccaactttcagcaatcgagtcgggagaactggaggtgcgtggcaaatctccagagggtgttctgcaagtcttcttccatgaggatggaggacggatatcagcacctcgtaccgtgtgggacaaggtaagtcatagcgccagcgaacatggttccggcctgctgaagacattgcttcctgggagaaaatttccatatccgaaatcactgtatgccgtagaggatgtgcttcgacttaccgttcgagataagccagaagccatcatcctcgatttcttctccggctccggtaccaccgcgcatgccgtcatgcgactgaaccgtcaggatggcggtcgccgccaatgcatctctgccaccaacaacgaggtagccgcagacgagcagaaaaccctgcgggagcagggactgcgccccggcgatgcacagtgggaaaagtacggcatatgcgattacatcaccaagccacgtgtggctgccgcgatcactggaaaaaccccagacggtggtccgatcaagggtgaatacaaattcaccgatgaattttcaattgccgacggtttcgaggaaaacgccgaattcttcaccctgacctacgagaccagaaatgcggtcaaccacaacctcgcctacgcacgtatctcccccttattgtggctgcgggctggcgcgattggccagcgcatcgaccagctgcctgcggagggttgggcggtagcggacagctacagtttgcttaccgaggtggatcaggccacgcccttcatcaacgcgctcaacaaagtaagaggtctgcgcatcgcttgcatcgtcaccgacgacgaccgctgcttccaggcgatagccaagcgactgcctgacggagtggaaccggtgcgtctgtacgaatcctatttgaccaatttcagctttgccaacggggaataaggcatgaagttcactcttaaagactaccaacgcgacgctgtccgcgatgcgttggataatctgaaggacgcgcgagatgactggcaccggaagtctcgcaaaagcgcgttctcgctgaccgctgtgaccggcgcgggcaagaccgtcatggccgccgccgcattcgaagcgctttttcacggcgatgacgaatttgattttgatgccgacccaggagctgtggtcatttggtttagtgacgacccatcactgaacgagcagacccgctttcggttgatagaagctagcgatcgaatcaatcataccgacctggttgtggtagaaaacaacttcaaccgtccaaggttcgaggcaggcaaaatctacttcctcaacacgcagaagttgagcaagaacagcctactggtgcgcgcatatgaccaaaaggaactagaggccaaggcgggtgacctgcttccagaaactcgccccgacctgcgcgcctacaccatttgggacacgatacagaacaccatcgatgatcctgacctgacgctttatctcgtcctggacgaggcgcatcggggcatgggtagcgccgcgccgaaggaaaagggcaccatagtccagcggctcattaatggtgccggtggagtcccaggcatctcagtggtctgggggatctcggcgacggtggagcgtttcaataaggccattgagtttgcgggcaaacacatcaagctgccgaacgtggtggtggatgccgccaaagttcaggagtccggccttatcaaggacaccatcctgctggatattcctaatgaagtcggtgacttcgatacagtgctggtacggcgtgcgaccgacaaactgaaagaatcaaccgttgcctgggctgagtatgccaagcagcaagaagaggcacgtgtcgtcgttcctctgatggtattgcaggttcccaacacacctatccccagcgacatcggacgcgctctggacaccatctttgagcgctaccctgagttgcctgcagccagtgtggcgcacgtcttcggcgatcacaccacgcagcggttcggcaaccacgacgtcccctacatcgagccgcagcgcgtccaagaatccagttgggtgcgtgtactaattgccaaagatgccatcagtaccggctgggactgcccacgcgctgaggttatggtgtccttccgtgccgccagcgaccggacacacatcacccagttgctgggccgcatgatgcgttcaccattggcccgtcgcatccccggcaatgatcggttgaacgcagtggactgtctgctgccaaagttcaaccgtaagaccgttgaagcggtcgttgataccctcatgcagggcgacgacacagcgccaccctctggacgcatccttatcgactacgtagaggtgacgcctaaccctgatgcgtctgcagccgtttgggaaatattcgaggccctgccatcgcaaacacgaccgcagcgcggagcaaaaccttctaggcgattgacctcattggctcacgagcttgcttcagatgacatccttccgcgcgcagggagattggctcatgcacatatgcacaaggagctagatgcgttccaggaaagccagaaagaaaaaatcgaggcgaaacgcggatcggtgatgaccgtggacggtaagacggtgatcgccgacttgaaggggaaggaaaagaacttcgatcagttctgggaagacgctgacatggcggtgatcgacgacgcctaccggcgtgcggctcgtatcttcagtccggacatttcccgcacctatgtcgagcatttagcgcagaaggtcgcaagtctggacaacgatccggaagaatacttggaggctatcgtcgaggcacgcgtcaccgtcgcaggtttggggctggttacggaagtgcagacgtactttgatacagaggctgacaagctagcaaaggtgtggctaaagacttatgcgccgcagataaaagcactgagtgatgatcggaaggaatcctaccggcaaatcattgaaatgagcaccgagccgcagagcgtggatttggctaagcccgaatctcgctatgagccaaccaaagcgcgtgagaacgataaggaggtcgccttcccgagctggaagcaccatctgctatgtgataaaggcggcaagtacccggccgaactcaacgattgggagcgtacagttgttgaaactgagtccgagcgaatcggcttccgcttttggtatcgaaatccgcagcagccaggacaggcctcgctgggtatcgcatatgtcgaagatgagcaatataaaatcgtccgtcccgattttgtcttctttgtcgagttagacggtaatatggtggtagacctagttgacccacatggtctgcatttggtcgatgcgctgcccaagcttaaggggctggctgtgtatgctgaaatccatgcaattgcctaccggcgcatcgagtccattgcagaggccggcggtaagctacgtgtgttggatttaacccgccccgatgtcagggcagcaataaagagtgcaacgagcgcgaagagcctattcgaaagtgcgttggcgagcgactatgcttgagttcgtcgtcatcctgtcatagctcaatccaaggcttattcgaaagccaaggtgttatctgaagtgatctgactatgctcgggtttgagtaggtatttatgcggtggggcgtctatatcggcgcccacttttaaaaccagtgctcggggatttcgatttcgtagttcttggctgtggtctttagcgtggcgagaatttcagcgtgccgcgtctgctcgctgggcagccaggaattgcggcgctccaacaggtttttcagttcgcttaggttgtacatgcccagacggtggaggttgccccagttggggatgccgaaaaggttgtagatgaccacggtggcgtcgcgctcgctggctaggcgtttctccccgctgagcttttcggctgcagcttcggcttcatctcgatcgtcgtaggtgttgagcaatttcattggttttcgaatgcaagctaaatgggtcgtagattctgcccgagtgacaaaaaaagaacatccctctcattggcctggtgcatagctggtcagctatgcaccaggccaaaaaataaagtctgaagtgaagccaatagggggcatgccccctatttcttggattagcaaggtgactggcctagcttggccagcggtgcgctagtcctcattgcaacagatagcccatcggctgatcatctttatcgaagcagaggatggtctcacagtgacctcctagctggtcggcattcgattcgctgatgtccggcaaccatttgcccaattcggcaataggtacttttttactgttgatgtaacagtcatcatccatgcgtgggttgcaccaggcggttttgacttctggccattcggattggggagtggaaggagtcttcgcggctgctgatgcagctccgcccttctcctgattccacgctacccaaccaccgatgtaacgtttgtcgaaggtcgagaccagttcattgtccgggacacctgcatcgaggtagagcttcatcaacagactacctgcttccgcgtatgacacttggcgagaggcgtcggtacgataggcgaccggtttgtcatccgtgctggtcccgatccggtaccacatcgagattaggaacgggatgtcctggttccactcacccaccattgcgttgctcacgcggcacttgccacgttgacacatcccactgatctggttgttgtagcggacgttctgctgacgctgggaatcccacaggagcacgtagcgcgcattggccagccaagtacagttcaagatggtctggccggtgtaaatcttcttcatgttacatgggatggcttcggggaggcccttcagtgaggtctcatctgggaagaacaagccgttgccttcgtaatagtccacggaggcggtggcgtgagcacagaacgcgagaacgagcatgctgagaatacgtttcatggtttatttcttactatgaagaggttggtggaggagaccgtggaggagggctactattttttgtgcacaaccttgagcttcttattgacgtagtccttgatgatttcgtaatcagggttgtaggtaactagtccgtggcccacgcttgcgacggctccgtgcgctaccacggccagtgttgcaggtgtggataggacggtgaatgcagcaccgattgcaccgccttggaccactgcacttttcacgtcgcttacaactcgacacttcaaccccagactttcaatcttggtttcaaccagtttgatacctgccatgaaattgcccctgaggccatggatttcgaaggacgctttgtttttcacgagaccttcaatctgcgcttcattcagaccggttacgacgatcatggtttttctgagctccctgcaagcgatagtggtttagagaaaaagtcgcatatcaaccttttggggtgagtctcggtttggtaagtccttcatgtcaataggttgatgaccaaccatccaagttgaattggagggtggcatgtcaaaaaccgaatcgaagcagctggcggagcttgttggccaagcaattgctcgccagcgtgctcgttgcaagctgagtcaggagcaggttgcggaaaagcttgggattggaagcgaggccgtatcccgtatcgagcgagggatcgttatgcccaacatcgagcgtttggtggagcttgcggcaattttcgggtgtgaaacggctgacctgctgaccgagggaagttcacgcccagaggaccaggcgcggaggctctatgacttgctgtctaggctggaggcgcatgaccgcgacttcgtcatggacatggtggagcgtcttgtcactaggcttgatcgcgactgatgggctcagtcacggcggttgcgttgtttcagaggactctttttccccggtctcgtcgaacagagcactacagcgtaggcacaagcagttgaacgccgcgaagtgatatttggcgacatcctcggctacccgcaacgccgatggatacgcgggagtgatagcggccaacccattgatgagcagatggctgcctggcgcttgggtattctcattcgctttctgcacttctcgcaacgcgctgtcagccaggccgagcaacagggcgatgcctttggctgcttccctagtcaggacggcctgggagtcgcagatcaagcagtatcgaagcatgattcattctcctggtaaaagcggccgtgtgtatggccgctgacggttaattggaatatttcaggtgggattgccccgactgggggaaattagtctgagcaagcgactcaggatccagcaggccagcaccacggccagtaacagcggtgggaagcgcagcatgagcagaatactcagcaccagcgccccggcggctgcaagcgcgccgacgaatatgaacaagcagagcaaaaatcgcagtagcgacatggcgggtctccaagatcttgtgcctggccgatgtactcggtaccgacaggtttgattcagtgggcctgcgaggtgagggcttctagttttcccgcgagggaattgggagctggctgcgattcaccctggctagaggtgctggcgggctccgaatttacgaagaactcctcgatcacgacgtgactgtcctcctcgctgtcctcgaaggcgccgttgccgaagcctcggcgagccgcgtcatctagagccctctgatcgaaacctgctgtttgccgctgtgtatccagctcgctcgccttctgcagcgcttcgctcatatccatgccagcgcgtatcgtgaggtcgacatagaagatcggcgtgccatggctttgccgggtggatttaccgcgtagacgcagctccagcggtaggcaagccagtcgattacctgagatggcctggaagtaatgcagtcgagcggccagggtgcggatgctgttgaatccggtggtgcggaacacaaagctacccaacgaatcctcatcaccgataatcacattcagtcggccgtaaggcttgcaggcaccatctttggccagtgggcaggcatcgggcgaagggcagggcagagactgtatgccgtcctgggcagcgcgcttacaggtttcaccattgcccacgcacaacggtcgcccggactgccggtcgaacaaggtgtaatcggcccggaaattcagctccggttcgttgaacaataggcgtataggaatactgcgcagcttgtcttccttactctggcgcagttcgtcgttgagtggatgtagcagccagccatccctgttttgtacctgggatgtgatggtgaactgatcatctttctccggcaggcgtttaccgtttctttcaacgactttgccgatggagatgcgtccgagcacgggcggagtcagtgctaagcctttcaacatgatggttctcctggaaatgaaaaaagaccagtcacgcagcgcgaactgcatggactggccaaggggagggaagagtgaaagaggtggaaatcagccgaccaggaaacgccttgcaccgggtttcagcagcgggtacttggcctgcaggtagggcttgttctggagcagttgagcgacatcgagaccgatgctgtccttggccttgcgccaggagacgtagccgctggagaactccgcccgactggcatcgcccatggcctgctgcagcatttgcttgagctcagcctcgcgcttttccttgtcggcaatcgactggcgtacggccttgagctctaagtaggccgcagctaatcctgcatggccgctgaagtcgacggtctgaccgttgtcctccgggtacaagcagcgcaaagccgcctcggccgatgcactaccgtcggctggcggcggggtatcggtttccacgtagttccaaaacttacgctccagttcgatcaggcgggcgatcatctgctcatctcgctcgatgcgatggatctccaggtgctgaccgccgagtagcaccgctacatctgccgcctgcttgccggtgactgcgagttggtgcatcacttgcagttctacatactcgggtacaccttccttccagaggcgtgccccgtttatgccggcggtcttgcattcgaggatctgcacgtcgtccgcggcgatcacctcacggtcaatgttggctagcatccaggacatatccggattcggatgctgcagtacggcgttgatccgtcgcaccttgttcttagtacgcttgctgtagtgccaggccacgattggctccagcacgttgccccagtacatcggactttcttcatcatgtgggtcggcttttggcagtgtggtgtctcgatcggttttctccagccacagctccaattgcgatttgtagggatttagacccaccgcagcgccggcatccgagctgccgatgccttgcttgcgcaccgccagccaatcttcacgaggcagttccttcgtgctgatcaggcgcagcgctggacgagccttgctagtgctgcgcaacggagtagcgttcatagcgttcaccttgcagaaatagaaacgcccgatcagcctcgttgctgatcgggcgttttggggggaggaagtaaccggttaggcgacaagctgcagggcggtgtccagagcacgttgcttgatctgcgccccttggccgaaccaggccgagtccatgcggtactcgttgctacgggcgcgacgttcatggtcgacgtactcggttacggcgttgagcaggccccaggcggtaccgcgagccgagtccagctggctgccgcgaccacggccttcatacagttcttgcaccttgcgcagggcgcgttcgttgggtagttgctccggtagttgattgctcggatttacctcacacaatactgacatgaaatatccaagagcctcatgccactgaaccttgcgttcagcgagatggcgcatgcgatacatgaactcgtcccaaccggagacggctatgccgagttgcttctttactgccttcggatcgaagcgggtattgtgcggcaccttgattgcacgagatgagccgtccagggctatcgtcagggtgttgttgcataccacacgcacggtggtgggtgttgccgtggtggccagggtgccgtcgcaggatgtggccaacagcaggtagccgttgacctgatcgtttcctttcagggcagtgccttgtccggtgcgcgccagtgcccaaaacttgcgcccgcctttgagtacccccgcagtctccagctcgtaaccggagacctcggtgaggtcacgataaaactccaacacttcccgaggctgcacggtgtggtagcgccgggaaaccactgacagcggtgctttggtgtccgaacggtagagcaccttttgctcggggaaggagtggatgcttccgagatggccgacagtatcggctttgaagtgaacggggctttcttggatctgccagtccattccggcctcgcgttgccagatttcgatgggttgtttctgcgtgagctgattgcctaggccatgccacggggcagagcaagcgtaggccattgtttcgacgagatgagccatggttgcgattcctttaggtgcacaccggcatatagcgccacgcagagcgcagcactgtccggacgtaatgaatagaaggaaagttgacttggttaggtcggcaggttgaagcgatgaccgcagagccggcagaggttgtgggccaggacgtagcgatcgagcgactcacccaactgggcgccgagagcacagccaccgacaccgccggccagcccaccgaggatggcacccgataccgaaccgagtgtgataccgacagggccggcgatagcgccaataagcgcgcccgcttggcctccagccaaagcagtactgacgccgcgcgcggcaccacccaacgtgccgatggccgcgccgactttcatggcgtgatggaatgaagcgactttaggggagttacaacgaggacactgcaacgacatgggatgaaccttcctgatagtggtgtcattgctgttatgtagagttgagattttgttgaatcgaattagtacgcctatgggcacgtgatttggtcgctagggcagcgaacacactcatccacttctattggaccgaattatgatgagttttgtctgctaaacgaggcgacacacattgtcgtacctgtgccccaagctggcgccattcgacagtttaggacaccgctatgccaatcttcccgcgtccgttcacctttgtgtgcgctcactgttcttggaaagaaacagttctacctcacaacgatttggcatcgctcggccaagcagcgttcataatttgtcctgagtgtcataccccttcgctggaggggcgagaagccactcgtcatgaaatcctcagaacccgcttggagcaatttcttagcctcaacgattgactcttcaaagtcgcgacacaccttgtcgctctaccctggaaaatgaccaaaaagacctaggagattacgattatgaaaaatctgtttgccgtcatcggtttttgtgtggtgctgaagaaaggctatgaactgtattgcgagtacagcgaactgaagcgcgacaaggaagggcgccagtcttctcccgcctgaacctcaagttccgcgcgccgttgtcgaaagactaaagtctcatgttgaatacaatagatggcaaaacgccattttagtcagtagcatcgatgccaaattggcgtcagcctgctggctatcagtcgaattgcaaacaaggtagtcaccatgtctcaagcgaaggatacgctgctccggctattcgcattattgcgcctgattcccaccgagccgcagcgtattgcaaccccgaccctgctcgaaaagcttcgcgatagaggtttttccgtgacactgcgctcggttcagcgtgatttgaaccggttatcgatacctttttcgttgcaatgcgacgagcgcgtgatcccgtttcgttggagcttcacgcgggatgcgccgctcagattggaggatatggatgcctccaccgcactggccttgtatctgtcggagagccatttaaacaccctgctgccccagaccgtattagaccaactcggtccacagtttcgccgggcgcgcaatttccttggcgatctaggccaaaacggattggccgattgggcgcgacgggttcgtgcgattcctaatgggaaaaccttgctgcccgctgcgatcgatccccaagtctgggggctggtgtctgccgttttgctggagcgcaggcaattgcaagtgacctatcagagccggagcaagggcgaactcaaacagtttcgcctacacccggcgggtctggtatcgcggcatgccatcagctacttgctggcctcggtggatggctatggtgatttgcgccagtttgccctgcaccgtattcagcacgttcaagtacttgatgagccgtccgtgctgcacgccacctttgatgtggacgattacatcgcgagcggaatattcagccatcgccaaaccaatattcaggtagagctgatcgcggatgttcatccgcagattgccgtcctgctcggcgagaccccgctgagtcacgagcagaccttgagcgatattcccgcgcatacctggaagcgtctgcgcgcccaagtgccgctggatcgtgaaacgctgtggtggatcttcggcctgaacgacaacatccgcgtgcatgggccgcaggtctgggtcgatgagatcagcaccagattgaacagtatgcaaaacctctatgcgtcaactgactacgcgacatgaactgtcgcactgccgtgcaagactgcggctgatcaacctccaatggattaacacgtgtttggtgcccaaggcacccggcaatagggacagaagctgatgacgggctccaccgctacgcctgcaaaacctcgaaaggccaggagggcggaaccttctgttaccaccacgtttgatgtgttggtgttggccacaatgagcgcaggcaaaacgtcgttcatcaacgcgctgattggccaggaactgctgtataccgccaatgaagccaccactgcctgcgtgacccgtgtcgagcatcgccagggcgcccgtcgattcaatggcgcctgttattgctacaacgacaccgagttggcctccctgcattccccgtcggtagccttgctaaaggactggaacgccaatgccgaggtcaagcgcatcagcttggctggaaccttcaaagtgcagccgcgcccagcgcccgggctggtatttcacgacacgccagggcctaacaacagccaggatgaaaaccacgccagactgatgctggaggctatccgcacggtgtcgttcaatgcgctttgctatgtgctcaacgccagccaactggggacttgtgacgaccggttgctgctcgaacagctgcgcgaagaactcgccgccaagcctgcccagccgatttatttcatcctcaacaaagtggatttgctcgatcccgagaagggcgaaagcattcaaggctatgtgcacaacgcccagcgctatttgcgcgatatcggttttgagcagccgatcatcattccgacaatggccagtgccgcgctgtacgcgcgcaaggccctgagtgccgaaacactgacgcgcgcgcaacgctccaaattgcgtcaggtactcgatgacctggaagtgaacaagcgcgatttgctcaatgccaccatcgtgccagaagtggttaagcgccgagtcttcacatcactcaacaacctggaacgcagacagcgaaccaaggcactcgatacccgtgcctacgataaaaaccagttgcaacagttggtcacaatcagtgggctcaaaaccgttgaagcccttatccatcatcaacgccgattagatgagcaaccatgaatactattgaaatcatccataacccattcatcgtcgagactcagttcctgatcagtggccaaccgccggccgaaggctgcaagctgtcgagctataaagaatcgcggctgcaagtgtggatcgagaagctgtttgatgagttgagtcagttgttcaatggtgacaataactttgatgtcactttcagaggggtcgagtcggactaccttgacgtggttgaggcggcgaaagtcgcgacgggcaagggcatgcaggtcactctgcagtttatcgaggctgacccggcggaggagcgcctgacccgcattcgtgagttgatggaagaggccaagcttcatcctgaatttgagcatttcattcgtgacaatgctgatgtcagccaatcctttgaagaagcattcaacaaggatttcgacgtgtatgtggtggcgaccatgtcctcgggcaagtcgacactgatcaacgccatgcttggccaggaccttctgcctgccgccaacgaagccactaccgcgaccattgcccggatcaccgacaacgcatcgatgggccagcgcttcgccgcccaacgcgtaaccaacgatcaccgtattgcggaaaacagcgatgacgtgagcctggaagtgctgcaggcatggaacagtctgccggacacgatgcgcatcgatatcgagggcaaaattcacgcgattcaagaccgtgacagcgtacgcttggtattgaccgacacacctgggccgaacaacagccaggacgaaagacaccagctcaaaaccatgagcttcattcaggactcccagcgcaacccgctgattctgtatgtgctcaatgccagccagttgggaaccaacgacgacaaaaaccttttgggtctggtcgctgaaaccatgcgcaagggcggtaagcagagcaaggatcggttcatttttgtcatcaacaagatggatgtgttcgacccggagaaaggcgaggacctgccttcggtactggcccgcgtcaaaaactatctggttgaaaacgggattttcaatccgctgatctacccggtgtcggccaacctgacgcggctgctgcgcaagccccagcacttgcactcacgcaaggaacgcggcgagttgaactccatgatggacatgttcggtgaagagccgagcatgaacttgctgcaatacatgccgatcaccgagcgggtcaaacgtagcttgcaagagaagaaactccccgagatcgtgctgagtagtggcttgccggcggtcgaagcgatgattgacgagtacatcgacaagtacaacttcccgcatcgggtcaagcgcgcctatgacgcgatgaccaaagccattgctgtcggtctcaacgaaacgcaactgatcgagcaactggatcaggacgagaagatgctggcgcatatcaatgaagagatccaggcgctggagtatcggcaggagaaagggttcgatacgcaggcttacaaggacaagataaagcgtgaaggtaaggtggtgccgcgggtgactgaggatgagcttgcgagcttggaaaaatctacggtcaagtatctcaggtcggtcagtgagcgttttaacggagaggtcgagccgcgtatcgctgaaatccgggtcaaggaagttgaagaggaactccagttccagtaccgaaagctcatcaatgcttatgaagcggtgttcatcactagtcagcgagtcattagtgaagaccttcaatctgaatatcagcgctacatcgtggctctgttcaacgactgccaacatttgaagttgcctatcctggacagcctccaaaaagctacggctgatatttccttcaatcttactatcaagagtgatgaggtgcagaccaagcgagtcgtgattgaccgttacgaagtcagtgacagcacttggtacaaccccttctcgtggggggccactcgcacagtttacaaatatggcgaagaaaaaaccgtcgatcttagagcgctttggagcgaccgcagcacgcgtgttgacgatgagtttggtcgattgatcgtggctgctcgtaccgaaatcgacaaaggcaagaccgtcctgattgatcagttcgtggcgtttatggggcgcgaattcgacaccaagttcaatgagttgattgactcgctcaaagacaagatgacggaccgcgacctgcgtcaacgagctcttgaagaggcccgtgagttgcaagcgtggatcaatcaattcaaagaaaaactcgacgaaaccctcgccgtttgacttcggagtttctatgacgactgacgccataatgattgaaaaagctcgtaagcagtttctgacggcgctcgatgacacacagtgcgacaccgatgtgttgcagaagataatggacgccgtgcaacagaccccaggggtgatggaggctcataaggtcgatgctgtcactcgcgccattgatgtggaccctgtgagttggaacccggaatatttcagtcggcaaaaggttttcgctgcccgcaacttttccaaggagcggctggagcatctgatacaggtccgcgacgtgtttcgtcaacgaaacgaaaagggatttacaccaactgttgccgcttcacatgtgagaaaagatccgatgagcagtgcgtcctccgattaccaaccttccagcaacctcaagaagtttgtcgaagaaggtgacttgttgacgacccgcacagcactgcgcctggagctcaacgaccgtcgtctggatggcgccgaattgcgcgctgcgctggggtggatcaaagatagtgtttccgggatattcgaggttttttcagaaggggcatttgcgcgtgagcttgtggcagatcagaacaaatggaccgaagattattacgatctacaggtcacttacctgaaaaccaacttctcggaaaagcgctttttgcacctgatcgacgttcgcgagcttttgcgcagcagcgctgttgagggctttgcttcgaccaagacaaaagcctccaccgcgcattcagcctcccctgtagcgcaagcatcaagcacccactcccgccagcccatttgcgatggtgcatcagagcgcaatccagccttcaaggccgcactgctgatcggcggcgccattgcggccgtggtggtgttccttattgcactggtacggtgacctgatgacctctccaatactgaccctcactgccgtgcaggatatccgtgaaaacgccggtctgacccttgaagctgggcgtgcgctgatcaatcgcagctacctgtcggagctggagcagtatccggtccatgcctttgccgagaaggggctgcggttcaatgctgccagtgacgtgcggatttttcgcattgagcgcatcgtccaggacaacaaacaatcggtactcgagagcaccacggccgcttacaccgcattgggtgctgcgggttactcggttttcctgatattgcgctccaacggtatcgaaaccgacctttacatcggcacccggggtgagcccggtaaaaccctcgggcacagttctggcgagctgctgcgggagaccttcaaggggcacttttcgggcagttcattagtgccgctgccgcaacagcatgccgatgccttgctgggtgctttgcaggccgaaaaggccaacccttcggcaagtatcacggcggtcacgggtgtgcctgcgttgtcgacggagaaccgcgaacacttcatgcaagggctcgagcgctttatcgatgcggctgagcgccgggtgtaccacgcgatcattcttgccgagccggtttcgtcgcagaaccttgacttgatccgcgccggatacgagcaggtcgccacgcaactttcgccattgctcaaacagcaattgtcgttcggcgaacaagacagcgattccgtggggctgagcatcagccagggcttgagtgactcccttggacacagccttgggctgaccgaaaccaagggtacgtcgacgacgctgggcacatcgaccaccgacacaaccggtaccagcgagtcgttcagtgcacagaccctgacctccaaaacggtcgctatcggtgccaatgtgctgggtatggtgggtggtgcgacattggggccattcggcgcgatgctcggtagccagatcggctcggccgctgctgcgctgctcaacgaacaacgcaccaccggtaccagccagtcgacgtccaccggccgcaatgaaagccacggcacgtccttcagtgaggccgcgtcgaaaaccacctcgaccacacacaccaccagcaccaccgacactcattcgttgaacaaaaccctgggctctaatcggcagatttcgattgagaccgtggacaagaccatcgagcagttgctcagcaaaatcgatcaccacctcgagcgtatcgacgaagccaagacatacggtggctggaactcggcggcgtatttcatcggtgacagcactgcgtcgtccgaatcgttggcgagtatctttcttgggctggtacgcggcagcaagtccagccatgaagacttcgccctgaccacctggaaatctgccaacaagtccgctgtgctggactggctcagcgcgttcagccatccgcaattgaagccggggttttcgaaaaagatcccgatcagttacctcacgcccgccacgctggtgtctggtaaggagatggcgatccaattgagcctgccccgacgctccacctccacggtggccgtgctggaaacccaggcgttcggccgcaaggtgcagcgcctggatggtcacagcagtgagccaggcaagggcaagacactgactttgggcaacatccgccacttatgggaaaacctgccgcaaaagatcgagttgagcctcgatcaattggccagccatgtgtttgtcagtggttcgaccggtgccggtaaaagcaacacgctgtatgaaatgctcagccaaatcagcgccgccggcgtgccattcctggtgattgagccggccaagggcgagtacaaacacgtcttcggtcatcgcgatgacgtcaatgtattcggcacgcatccggcccactgtgaattgttgcgcatcaacccgttccgcttcccgttggccattcatgtgctggagcacgttgatcggctcgtggaaatcttcaacgtctgctggccgatgtatgccgcaatgcctgccgtactcaaagaggcaatcctgcaggcgtatcagcaatgtggttgggacttggacgcgtcgaccaaccgttacagcgatgcattgtttccgacgttcagtgacctgctcagtaccctgcaaagcgtgatcgaggcctccgcgtactcccaggagctcaaaggtaactacatcggttcgctgtccacgcggatcaaatccctgaccaatggcttgaatgggcagatttttaccgctaacgaaatcgacagcgcagagctgtttgatcagagcgcaatcgtggacctgagccgcgtcggctcgtctgagaccaaggccctgatcatggggatcctggtgatgcgcctgagtgagcaccgaatggcctgtggtggcatgaaccagccgctgcgccacgtcacagtccttgaggaagcgcacaacatcctcaagcgcagcccgtccgaaggcggtgctgaaggggcaaatgtggtcggcaagtcagtggagatgctgaccaatgccatcgccgaaatgcgcacctatggtgaaggtttcatcattgccgaccagtcgccccatgcggtggatatcgccgcgattcgcaacaccaacaccaaaataatcatgcgcctgccggatgaaatggaccgtcgtttaatcggcaagtcggtggcgttgcgtgatgaccagcttgaagaaatcgccaagttacccaaaggtgttgccatcgtttatcaaaatgactggctggagccggtgctgtgtcaggtgaagaaattcgctgggcatgaaaccccttatgtgtataccgccaatgacaagcgcgccgtgcgtagccaggatttcaacctgcaggtactcaacctgctgctgagcaaccgtatccgcaggccagtcgccttggatttagcgttgctggaaaatggcttgtgtgaattgccgttgctggctcgcagcaaaattgcgctgttcgaggcgctcaatgcccacaaagaagagaagccgtcggcgctgtgcaagcccgaggcatttacctacgccgcacaattggtggtcgatgtgctcggttgccggcagcaggttcagcagatcattcaaacggcgaccgattacgggcaactcagcaatcaactggaccagctactccacgagcgagcgacagccttgagcactgagctggccctggcgacccagcaatgcttgatgaaggattacagcctccagcacgagagccatatcgatatttattctgcatggcgtgcgcacctcgaaacagggagcgttctgtgaactttgaaaatttctttgctggaaaaaccgaggttccgtccaacctggcgttactggcgcgtgaaatgccggaccgctgcctgatcgttgtcgagcttgatcgacctatcgtgctcacccaggaaacccgcctggagctaccgcaaatgtcgccggaaacccgtgagcggcttgaactgctgggcgttccaaaagaggttctggatgctatcggtagtgaagccgaagcgaaaatctatgaaggcgcgaatcttgaaccggccgaggtcaatggcaaggatgcactgattcgtaccgacatcgattacgatcaaaaagattatatgggtaccaccaacctggaccggatgaagtcgggaagggctccgctggatgccaacggaaagccgatcgagttacatcacatcggccagaaacaggactcgccattggcagaattgaccagcgctgagcaccgtggcaacggaaacgataacgtgctgcacaacaaacagaaggagtccgagatcaatcgcgaggacttcgataaagagcgaaaagactactggaaggcgcgagccgaacagattgagaatcagcgctgagggcgaatcttatgaaaaaacttgaacaactcgttgatctccatcaggccaacacccggccagtagataccgccagcatccagaatcttgagcagaaactgggattcgcactgtctgacgaatacaagcgctacctgtcggcttttggagtcattgtctttgacgcctacgaaacgtatggcctaggcgtgcctgacgactattacctgaatgtctttgccgcattctcggacctgggccgtgacccgacctacccgaaaaatactgtgccactgctggagattggtgatggtcaatactatctgtacgacaaccacgcacggaaagttctgatttgggctacaccgaatggcggcattgttcatgtattggaagacggcctggagacctttttaatcaagcaggttttcgtcggctagctgaaggtagtttgaacaaataggactctgtctcattcatcctattaggtcgcgtagttgtgtggggcgagtgtcagactccccccaacttggtcctaaaacgaatagtcgaggcagaataatcgcaaaattttgcaatgtgaactattgagtagtgcgctttccctccaagtcactttcgacgatgtttacgatgcaaaccaagggagataccagcttgaaccagcctacgcccgcaacgagaagctttgatgtgcttattcatctggatcaaggagacagcgcaaaggcgctctcggccaacgagcttgtccagcgccggcactacgaacttctccgggatcaagtgaatgaacacctcgccaccttgaggcctgcagagtcactcaagcaggactacccatacggcagtggttggacgcagttccttgatggttcccgaggcgcaggcaagtcaactttcttgagttcagtaaaggctgccatgaaggcggatgttgacctgaaaagtcagatggcattcatcgctctgatagatccaagtcgcatcgagcatagcgagatcatcctgctcgtcatcctgcagcacctcaacaagcgggtcgaggaggccctcaaggaactgcgacaaatgcataatgaacagcttcgggacgaatggcgccgagcgttcaagggagtcgccggcggcctcagcttattcgcaaaggaataccacccgctcaacgatctggatccggagcttttcctcgactggggcctggagcgcacaagcgacagcactagcttgagaacaaagttgcaccatctattcgagactgcgtgtcgcattctcggtgtgcaagggctgatgcttgggttcgacgatgctgacacagactccacgcatgcaattaacctgctggagtgcatccgaaaatacttagataccccccgtttaatggtgctggtgacgggggacatggagctctattcgctcctcgtgcgtcaacacttcgcaacaacggtcgcaggcagacccgaggcagctctagaccttcagcgcagttcaaagcaaggagaccgctcgggccaatatctacgcatgattgatcatatggaagagcagtacttgctcaaactcttcccgatacggcggcgcatgcagttgaaaccattgtggaatatcaagcttcttgataattgccacgctacctatcctgcttggggccagaacgagatatcggtagaggatgtagtccaagcaatagtgcagcgtggtctgcgtgttaaagccagctctgacgtgtccacatataccgaatttctgctcaagcaacctctgcgatcagttttacaggtgctatccagttgcgcaccgcatctggagatatcgtcttctgccgacttgaagtcaggggtttggtcatttgatttgaccagtgaactcagccgctccttacaggccctagcgctgacaagcctctataagttctccgtcgataccgacgcgattgccgcaaaagagttgccagctttaacgctggccgttttcgacctctcactggaggacggagacattgatactgctccatatctccggccaatgtcggcggaacaggacatcaaggcttgttttgctgcactggcagcggaggtaccaaatttctgcgccggcaagccgggaacggctcttcggtatcttttgcgtgggcccggcagtgtgtcgctctacaaccttgccaactctcatctcagcgataaggactcaacgtcttcattgggtcgcgtgcaccaattcaagtcttacatgggtatcggccgcagagaagacagcctagactgggctcgacgcgcgacagcagtcatcgcaatgccctacagcgtgaactacaagccccgtgtcgttttgcccggtattgtggggctgcgtcgaggtacgagagggagaaagggcgagctaatcgctcgggccgtgatccaacgtgctgttgataatacagcgattccgcatctgcccgtgtttgcgctaagcatggtcaacgtagtgagcgctactaatccgcgtacctatgggtccatctttacgctaatcggcctcatcgagaaattgctttccgcagataaccagggtgatctggaagcccggacggtctatgagcgggcttatccgtctctaaccgtttctggtcccagttggtcgcgccaaggcgacgctacaccggaagatgaggacgacgaagataagcaacgcgcactggctgagtctaatgagtgggctaaacaagaagccctgtggatgagcattaatacttggctcgaaagcgtgcgcgatttgtttaagaagaccatgccttcaggcatttttctaggcaaggtctggacacgactcttcttcagtctgcagaacgcggccgaggatctgaaacccagcgctaaattcgacacggtgatggagattttttcactctgcgttattaacgcattcttggtcgaggaggctgaacaccacctgcttgacacgtcagatgcgtcgaagactatttcgaggatcgacaggaacaaccctcgaacctcggctagctggtttgtcgacaagctcaactcagcgaaacctcaaagagatgatttcccatttacggcaatcatggcgacatgccccttgcttctgggacttctggacactgaactggattatgcccaagcgttgaaaccgttgtttcctgatgacatgaatgaagcggcgatcaagggtttgttgtgcccgaaagagcttaaggagctcatgcagaaagtttccgtaacgggcgagtcacggtcccgacaaactgcatctcgtggtgctggtgaggccacccacgaatgagtgcccaagccgcctccatcggctcactcctctcgacgctactgctgtcggactaccgggtcctgcgtctctcttgggagacgcccttcacccagcagttggaatggtctaagttacgggagcccgcctatctcgcgtaccagccttgggctgcacgctttccggatcatgtgttcgattcggcatggcgcttcctggcagggcggcagcctgaaaatggcgtcctaatcaatgcgctccaggccctggtcgatgagttcctgagcctgcggcatggcgagttgcgtgtccatcgcgatctattcggctcctggcagcaaggcgttgccagcaggctttcttcgctcccaatccaagctgcagctgacgtaattctccgcgcgggggagtgcaacccagaccgttcgtttcgtttgcggctcgactcattcaatcgagagatagccccgtggagacgccaagttgtgcccttgcttcgaccagaggaggctccggtcgccgactatgttgagcgggaaggtttgcacgaatcacacctacatctgaatggcagtacgcatgccgagatctgctggctgcgtgcgatccgcgactcacgcgcggaaactcgggatttcgtgaacgcctggacccgcgagaagagcggaggccgtattcgcgagctagttggacagacgaatccagaactgactccgcaggtctttcaccagcacctgcagactgcaggccggcttcgttcttggctcatcggctctacaaatggccagctcgcgccgaacgcactactgccatcgtcgtgtcaaagtttgtatagcgctgggaacgacgagtggtctgaagggttaagcgtgcctactccgtcgtggcgtgacgaacccgatgttgaagaagagttcacgtggatggcagctctcgttgccagacttcggcaacacccgagcgtccaactttctcggatgtttcatacatacttgctgctgctgaatcaatactatcgattgctcgttcagagtgaagcgcagtatgggttcgaccagtttcagaagttcactctgacggggcttcgtgagccgtcggaacgggagtttcgagcgcgctttcacgccatgcacggacctcgattagcacgtagcactgtcggatatctggagggacgcttcgcccccaaagtcgacccgctaaaagcttgccgattgttccaggcaatcctgggcggctacctcaattatctaaacgatgctgctgctggcagattgtccatcaaaccaccccgttctctctctgccttgttgagcgagctagaccgctattttgagcgaccgactttccctcatcgaagcgttcatcggctggcactggtcgcacattttatcaagctagactggtcgcctaatgaaaagggcaaggcaggcccatataggcactacccactcgacatgcagctacgtcgaactactaatgtgttgctctcagttctcgcccgctggcctcgactaaggacgtgggtacggggcatcgatgccgccgcaaatgagctacacgcgcccccggacgttttcgcccctgccttccgtgtctgccgtcgagccggtttggataggcgcacctaccacgcgggtgaagacttccggcaccttctgtcgggtatagccaccatgtgggaggcactggaactactggatctgcgcaacggcgaccgtatcggacatggaacagccatggggatccgcccaagcctgtggcttgatcgtatgccaggcaaaatcaccctgcctcgaggtgagtggttgctgagtgtgcttgccgcttggcagttgctgcgggatgtgccagagatgcaagcctgcgtccaccgccttcatcgcgaactggagttggttgctcaccaaattttcgggcgttcactggtagcgttcgacatcgaacgcgcgatggcgcttcgaggtttgagtcgccttgacttgatgcgccagctaaccggtgacgaaaactcgccgcacgaaccgctgagcgacctctggcgcgaggaaactttgcgggttaggtcagcgtgccagaatcagcctcaggcagtgggactgctctgggagtggttgaacgacgcaggggttcacaaacgtgcaggcgaactgaccgagaaagaggctgacttcatggatgcccaaggttacctccgactgcagcaagcgctaatgcaacagattgccgatcggggagtcctcattgagacactgccatctagtaacgtccggatcagtcaataccaccatatcggcgagcatcactcgctacgctggatgcgggtccccggccacgttgaggatggagatccggacattaaggtgtgcctcggttccgacgatccagggatcttcgcgagcgatctcgaaaccgagttctatctaatgtacgccacacttcggcgagccggtctcagcgattctgagtcgttacatcgcctgagcgtattaaacgaacgtggcagaatttatcgcttccaccatcccttgctgtcgtgagcgggcgaatcgtcgcttcagacaccaatctaccagcgacagattgtgctctgaagattcattagtcgctcttggaatccaagtctcagaaatttcgtgattccaggatgatttcaaaatgctatatgatcgtattctggagagtagattaccaatgagggttacatgagctatagcgccgagattagccgtaccagtcctactgcattcctgttcctggttgaccagtccgggtcaatgcaagacaccatgacaaatgggaagtcgaaagctcagttcgtggcggatgttctaaatcgtacttttgccacgttgattacccgctgcacaaagtccgaaggtactcgtgattatttcgaggttggtgtcttgggctactccggtgctattgctgagaacggcttgtcgggggcgctttcggggacggttttgaacccgatttctcagattgaagctcatcctttgcgcgttgaagaccgggtcaaacgggttgatgacggagcaggcggtttggtagaccagtccatcaagtttccggtgtggttcgagcccaaagccggaggcggcacccctatgtgcaatgcaatcacaaccgcagcggagcagttggttgcatggtgtgatgcccatccggacagctaccctccaaccgttttgcatgttacggatggtgaatcgactgatggggatcccgaggggcttgctcagcaactccaacaaatcagcaccagcgatggaaacgttctgttgttcaacctgcacgtgagtactagtgggggagatccggttaaatttccttcctctgacgcgggcttgagcgataactacgcaaaattgttgttccgtatgtccagccccctgcctattcatcttcataaagttgcagaagagaagggtattaacgcaaccatggaatctcggggtttcgtttttaacggtgatatcgccgaaattgtcgacttcttcgatatcggtactcgggcagctcagttgcgctgaccatgacattccgaatcctctttgacgggacggtagccaagcacctcgatgcgccagatgataacgaggacgcttaccgtattgctcaggatagggggcgtgtggtgctatcagatggcgcctcggagtccttcgatgcgagtagctgggcgaacttggtggtggatcagtttctaggctctgatccgtcggacgaacagcttggtttgtgtattcaggcatatgggctgcttcacgatcctcaaactttatcttggtctaaagcagctgcttacgagcgtggcagcttcgccacgttggtgattgcacagaatgatcatgatcgcaaaacggtaacagtgacgaccttaggcgatagccttgtcgcttggtgcaatgaaaatggtgaaattgaaaccgtcccttacgtatgtgctgatcagttcacagagaagccaactctcttagctactcgcagtgcactgaatgcagaagtggctatcggcgaccaagggccttggagtcaaagggagtggagttacgaccagcaggaagcatgtttgcttctttgcatgaccgatgcgctgggagcttggctactgcatcgtcaagagcagggctattcggatgcctttgagcggcttagtggaatcagggatcaacaggcttttcttgagctggtagaggaagagcgagcctccggtgcaatgcgcagagatgacaccaccttgattatcgttactctcaacagtttgacgtaaaccatggcatacccaaccttagaacaatacaacgaggccttgcagtccccgcagttagtactgcaagacgctgagttgaaacatggccgattgaaaacctccggattgggtctgcccttggctttgtgcggcggatttgcgttgacttatatcgtggatttagcgggcaagaggtttgcacttcgttgtttccacaaggagtcaagagagctggagcagcgctataaagcgatctccgcgcgaatcaagcaattggccagtccttattttttgcccttcgatttcatcccgaatggaattcgcatacaaggatcgacgtatcccatagtcaagatggcatgggcgcaagggcgtactctggctgagttcctagaaggcgagcatcaaaacactcaagcactccaacgtttacgacaagctctcgccaagctggctgggtttcttgagcagaaccagatcgctcatggtgacatccagcccgaaaacgtcatggttagcgcagacggcggcaccgtgcagctaattgactacgacggaatgttcgtagaagggtttcagggggcggctgctaccgaattggggcaagtcaactttcagcatccaaagcgaacggctaaagatttcaatcagaagctcgaccgcttctcgttcctcacgttggatgttgcccttcaggcccttgcagtttccccttcgctgtggggtgtatctcgttcagaacctagcgctgtagtgtttcggcgaaatgactttcttgatcctggctcttcaatcatttttggtgaggttctaaagcttcctagcgtggcaagtcacgctaaaaatctcgctagagtggtcgtaggagaatttcaaaacgttccgacgcttgcggattttcttcaggacaaaggagtcgtcggcggggcgattacattccagcaaaaggccactccatccgcggttggatatcaaggtgcttacctagtctgcgacgcaacaaaatatgttcaggtgcttgcccaggtaggcagccgcatcgaacttattggacagattcactctgttcgaactgggtggggagctaataaaaaaccgtatgtttttgtgaacttttctgactggcgtgggcaagccgtcaagctagccatttggtctgacgggatgaaagcaatcggatcgaatgtacccgataaatcctgggtgggacgctggctgtcagtaacagggttggttgatcctccttacaaaggacaggccaaagcggttagttacacgcacctttcactaacgattacagcatctggtcagatacaacagttgccggagcaggaagcgcaattccgacttcgtagctttggcctttcgcccgtggtcaattccaccccgagtcgaaacgctgacgtactttcgagtatggggaaggggcgggttgcttcagttactcctattcagaccgcgcctccgaatgtgcctcccccgaaaagctcgaaccagcagctacttgaaaagatgcaagctcaggcgtctcaggctgctcgtcagacgacaagcgctcctcaagcgtctactcaatggcaaagctctcctgcgccgaggccagtaagtactccaaaacgatcttcaggaatagattgggttggctggttgttcattataattatggggcttggcttattacgagcctgcgtaaaatagacccaaccttcagcttaacttggctagcgaatgcttattgccgttttctgccgaccgctaccggtcgaaaacgccccgttacggctaatactaaatattgattggttagcgtatcgatacaactttcaaacctcgggttgtttgaaatgccgagacggacaggctaccagtggcagcttgttgaatgtggtcgctccaccagttcatcatgggccgtctgcgctcaatgtaatctgctcggttgtaggcgctgcgcacttcgtctttgtcgacgtgggcaagtgctacttcgatcaattctggatcccagtcgccatgttcattgagaatggtactggccattgagcgcatgccatgacttaccaggcgcccttcgaaacccattcgcttcagcgccatgttggcggtctggctgttgcagtgggtgcgagggttccggtctgcaggaaacacatagtccctgtttccactgtaaggcttgatagcctctagcagtgccagagcctgctccgtaagcgggataaagtgtgtgcgacgcttcttcatgcgctccgctgggatcgtccagatcttcttatcgaagtcgatgtctgcccagcgggtggtcgcggcctctgctggtcgggtcatagtgtggagctgccattcgattaggcaacgcgttgttcttttgatgctggcattggctattgccaccatgagctcatttagctcatcgggaggcagtgtggccatatttttcttttttggcttcttaaagaccgagcgaatcccgctaagggggttggcatggatgagcccgtaatttaccccgtaagtcatgatctcgttaaggcgctgggtcagccttttaacggtttccaagctacctttggtctcaagaggcctgagcaaattgatgaccttaggggctctgattgcggaaattggggttgagcctaggtccgggaaaatgtggagagtgagcgagcgccagatatcttcagcgtaggcagcagtcaccgagtctttcttcagatcgaaccatgccttcgccacgttttgaaacgtgtgctctgtcgcggctttttctaccaggcgctgaacatcacgctgctctttcggatctagtccttgggcgacaagctccctggcctcaacagtccgttttcgcgcttgggccaggctgacttcgggaaaggtacccaatcccatgttgatccgttttttggtcacgggatggatatagttaaaattccaaagcctagatccattgattctcactcgcatttgaaggccgttgccatccgtgagcgtgtagtccttttctttaggcttggctgctttgactttcatgtctgaaagccgcgtggcttgggcgcacatggtgtattccaatgctgtttgtgtattccaaaaattaccagttgggagcttggaataccacttggaatacacgtttgcatggatgtctatggacgctgacggatcttgattgtgctgaaagccccgtatttgctgggttttaggcacaaaaaaagacgtccgtggacgtctttagatgtgtatttggtggagccggggggatttgaacccccgtccgccagtactccgctgtcggtactacatgcgtagccgtttctattaagttaaccctcagcgacccgaagggcagggtgctttgggcgagttgtgtaagttttagccgcttcgtccacaacgtactgcacggcgattctgttctatatgacaatcactttgggtttacagacatcccctggtgattgctggacccgaaggtaccagaagctcagggctaaggctgcttacgcagcgagagcgaattcctggccgtagttttcgtcattggcaactataagaagttgcaacagtggatttacgagttctgttaccaactcggcatgcacctaaagtttcgcgaccggcgtcgaatcctaaacggccccgtgcttgtaactcattgtttctttgtgagtgacaagcctgtgcagtgtacgccaaacggtcagagaaggccaacccgaaggttggccgtgagacggcgccgggtttactggccgcctttctcgctgttctgcaagtcttgaatggctttggaggtgatctcgatgcacttcttgtcatcgccggcggcatgagcggccttggcttgggacacggcggtgtcgatttcgccctttttgccactggcgtcagtcgcgagcagggcttggccgttgttgattttgtcgaggttgatcttgcacaggtcgggctcgccggccgcgaaaacaggggaggccagcatcgcagcggtaatgaacaagccagcaagagcggaacgcttcatagggtatctccttgcgaaaaagggctcgacgctgctggcgttcaaggcctgccagcgacatcactgttgagcctcgttcgccgaggcctatgcagatgactgcgccggcgcgcaggggttctgtttttttgcaggtttaatgcacgcgggcctgggtgacgcgatccacgaggtacaccagcccgtgatagtcgatgccgccatgctggctcaggccgatctcgcaggtgcggctggtggagatgccttcgctgcaatattgcacggcgtttttgaggctgcgcagtgagtgggcgttgagttccggcgtggtgaaacctttgtcaccggcaaagccgcagcagtggatgccttccggaataacgacggttttcgagcaacgccgggcgaggtcaatcaacgcctggctttcacccaaatgctgggtgctgcaggtgacatgtaccgcgatgggcgcttcctgcggggtgaagtcgaggcggtccatcaaatgcgtgcggatgaaacgtaccgggtcgtaaaggtccaggcgtgtttcgccgaggtcctgcaccagccgcagggtgcacgggctagtgtcgcagtagatggggtcgagcccgccacggctggcgtgaagcagggcgccgatcagttcctggcgcttgtggtcggcttgttcggcgtagcctttggaggcgaagggctggccgcagcagaggctgtcctgattgtcggggaagaccacttgataaccggctttttccagcaggccacgggttttgtcgtacagcgacatctgctctttatcgcccgccgccgggcccatcgcgcgtgagacgcaggcggccaggtaaaccacgcgcgggcgctcgtcattgaccgtggggctgaaacggatggctttttccggctgcggcatggcgtttgtccactgcgggatttggccgttggacagctgtgtgatttttgccgacagcttggtcaatcgcggtgcgcccagcagcctccgcgcgccattggcaacgtgcagagtgaagcgcgcaccttgcagtgccgtggcgaaatggctggcgagccagtcggcggttttcgtacggtcggcgtcacggctgcgcagttttttcaccaggtcaccggtattgatgcctacagggcagcgttgggcgcacaaccctgtggcagcgcaggtgtcgatgccttggtagtggtaagccgcttccagttcggtagtgtcgacgcccgcgcgtttcttcgcctggatatcgcgccagatcacgatgcgctgacgggggctcagggtcaggcctttcgacgggcacaccggctcgcagaagccgcactcgatgcacttatccacaagctcatcagccgcaggcagcggcttgaggtgtttgaggtggatttgcgggtcttcgctgagcaccacgtcggggttgagaatgccgttcgggtcgagcaggcgcttgagctgccacatcagttgataggcatcgctgccccattccagttcgacaaacggcgccatgttacgaccggtgccgtgttcggctttcagtgagccgccgaactccacggccaccagttgcgccacgtcgtccatgaacgcctggtagcgtgcgacttcttcgccgctgttgaagccttgggtgaagacgaagtgcaaattgccttccagagcgtgtccgaaaaggatcgcttcgtcgtagtgatgtttgtcgaacagttctatcaggcggttcacgccgatggccagttgttcgaccggaaaagtcacgtcttcaatgatcaccgtggtgccggttttacgcacggcgccgacggcagggaaggtgtccttgcggatggcccacaagcgggcgttctccagtgggtcttcggtgaagtcgacctgtttttccacagggaagggcgccagggacgccatgatcagcgccagttgctcatacagtaatgacgttgatgcggcgcgggattcgatcagcagtgcgcaggcattttccgatagctgttgtacgaaagccggcatgccgggtttgctttgcactgaacgcaggctgcgtcggtccagcagctcaacggccgagaccggctgggttttcagcacggtgaccgcgttgcagcaggtttcgacatccgggaatacgatcagcgccgaggctttgttcggatggtcgatcaccgtgtcgtaagtcactgcgctgataaagcccagcgtgccttcggaacccaccagcaagtggctgaggatatccagtggctcatcgaaatccaccagagcattgagtgacaggccggtggtatttttcagacggtatttgtggcgaatttttgcggctaattcggtattggcccgcgtctcgcggccgagtgttgccaggcgttccagcagtgcgccgtgcgtttcacgaaaagctatgacgctggcggcgtcctcggtgtccaggcggctgccgtccgccagcacgaggcgaatgcccgcgagtgtgtgataggtgttttgcgcggtaccgcaacacataccgctggcgttattggcgacgatgccgccgattttgcaggcattgatcgatgccgggtctggcccgatcttgcggccgaacggtgccagccacgcattggcctgagcgccgatcacgccgggttgcaggcggatttgtgtgccttgcccgcgaagctcgcggccgttccagttgtcgcccagcacgatcagtaccgaatcgctgatggcttgcccggacaagctggtgccggctgcgcggaaggtcaccggcacgcggtcgcgttgggccagttgcagcagcgccacgacttcgtcttccgactccacgcgaatcaccagctgtgggatgagtcggtaaaagctggcgtcagtgccgaaggcgagggtggaaagtgggtcgtcgaaacggcgatcgttcgggatcagctgtgcgacgtcgtgcagaaaggcagcaggcaggctcatcggtcctccagaaatagcagacgccggaaccgtggtccggcgtcgattcttaccctgtgacgtgcagctctttagtgcaccagcataccggtgaaccagtaggcctgcgccagcgtgatcaacccgacgatagtggcaaaaaacaggctgtgcttgagggtaaagcgaaacaggtcggattccttgcccaccaggccggtggcggcgcaggccacggcgatcgattgcggcgagatcatcttgccggtcacgccgccgctggtgttggcggctaccaacagggtgtcgttgacgccgatctggtgggcggtggtggcctgcaacgagctgaacagcgcgttggatgaggtatcggagcctgtcagaaaaactcccagccagccgaggaaaggtgagaagaacgggaaggctgcgcctgtgtcagccaataccagggccatggtcgaggacatgccggagtagttggtgacgaaggcgaaggctagcaccatgccaatcgacagaatcggccagcgcagctcgtagaaggtctcttttaaagtggtcagaccagttttgatatctatctgcagcaccagcatcgagaccagcgcagagaagaaaattgcggtgcccgtggctgaaatggggtccagcttgaacactgccgggatggctgtcgggttggtgacgatcggggcaaccttgatcaccatctggtccaggtgcgggattgcgaagttgaacacccagctgtacatcgacccgccggcggcgaacatcgccttgaagggtttgagggtccagatggtcaccagcacggtgaggatgaggaagggcgaccaggctttgaaaatctggcccaggctgtaaggcgaggcgacggtttggcgcggttggccgaaaccgcccacgctggcggtgatggctgcgctggaagtggcgccggcaatctgtgcgcctgccgtgcgcttgggttgccagaccttcaggaataaggtcagggcgataaggctagccagggctgaagtgatatcgggcagctccgggccgatgaagttggaggtgaaatattgggtgacggcgaagctcaagcctgcgaccaaggcggccggccaggtttcgcgaacgccgcgcaggccgtccatcatgaacaccagccagaacggcacgaacagcgagagcagcggcagctggcggccggtcatggcgccgatcttgaatgcatcaatgccggtcacttggcccgccacgataatcggaatgcccagcgcgccaaaagcgaccggagcggtgttggcaatcaggcacaggccggcggcatacagcgggttgaaacccaggcccaccagcagcgcggcggtaatcgccacgggcgcgccgaaaccggcggcaccttcgaggaaggcgccgaagcagaaaccaatcaacagcacttgcaggcgctggtcgtcggtgatcgacagtacggagctgcggatgatttcgaactgtccgcttttgacggtgagtttgtacaggaatacggcggcgacgatgatccatgcaatcggccataggccgtaggcaaaaccataaccggcggcggcgagcgccatgtccaccggcatctggaaagcaaagattgccaccaggatcgacagcgccagggtaatgctgccagccacatggcctttaaggcggaacacggccaaggccaggaagaagaacacgatcggaataacggcggccagtgcggacaggccgaggctgccgagagggctgtaaagctgttgccaggtttgcatagtggggtggcccctgattgttgttgtttggtcagcttggataattggtaataccaatttacagtcgctgttggctagagtaaaagccttggcaggggtgtgtcaatttgccgcctgcgaaactttggtcgaaggcgtgtactgatcggttgaatcgaaggcgttctgataggtgccgcaggcgcagcgataggcgagaatagagggcccggcgagtggtcgggattgtggagagtgagttatggggtttgatcaggtgcgtcagcgccgtttgtctgacgatattgtcgagcagcttgagggcatgatccttgagggcacgctgaagtcgggcgagcgcttgccggccgagcgcgccctggctgagcagtttggtgtgtcgcgcccgtcgttgcgtgaggcaatccagaagctggcggccaaggggttgttggtcagccgccagggtggcggcaactatgtggccgattcactgggatcaaccttcagcgacccgttgctgcacctgctggaaaacaatcccgaggcccagcgtgatctgctggagtttcgtcagaccctggaagcatcttgtgcttattacgcggcattgcgtgccactgaggtggatcgcgagcggctcacggcagcgtttgaggcgcttcaggattgctatgcgcgcgctgatgaagtgtgccggatggaagagggggcggcggatgcgaggtttcacttggccatcgccgaggccagccataatgcggtgttgttacacaccattcgcgggttgttcgatttgctcaagcgcaatgtggtgaccaatatcggcgggatgtatcagcagcgtacggaaacccgcgacatgctgatcagccagcatcgggatttgtatctggcgattatcgaggggcgggctgagcaggcgcgggaggtctcaacacgtcacctgcagtatgtgcaggaagtgctggaagaggtgcgtcaggaggttcagcgcgtggcgcgggcggagcggcgtaaaggcatgtagcccgcggggagggctacatggtcacaaggattagtcttccttgcctttgttacgcacagcgcggtgcagctcgcggttggagtcgcgctcgcgctcggtgtcgcgcttgtcgtactccttcttgcccttgcccagtgcaatttcgcacttgaccagatgcttgctccagtaccaggacaggcagacgcaggcgtagcctttctgctgtacggcagcggcgagcttttccagttcgcgggcgttgagcaacagcttgcgcgtgcgcaccggatcggcaatgacgtgggtgctcgcggtggtcagcggggtgatatgactgcccagcagccatgcctcgccatctttgagcagtacgtagctgtcgaccagttgcagcttgttggcacgcagactttttacttcccagccggccaggaccagaccagcctcgaaccgatgttcgatgaagtaatcgtgtcgcgcctttttgttttgcgcgatggtccctgtggggtgtttcttttgtttagccataggggcggcattatagggagttgcgagcgtgtcggctacggtcaacctgcgtgcttgagcgtgttggacgaatcccggacaatacgggcagttctttggtttttttctctcgcggatcgggctgttctttcgcgatgtttgcctcaagcagtggaagtaacgctcacatgacgacgcatattcaacgttcggccttactgccttacccggcgcaggcgctctatgacctggtcaacgacgtggcgcgttacccggaattcctgccgtggtgttctgcggccgaggtgctggagagcagcgatgagcacatggttgcccgtgtcggagtggccaagggcggattgagccagcactttgttacgcgaaatgtgctggtgccgggggcgtccattgaaatgaatctgcaggaaggtccctttacccagttgcatggcgtttgggtgttcaaggcgctgacagacaaggcctgcaaaatcagcctggacctttcttttgattacgcggggccgattgtgagagcgacgctggggcctttgttcaatcaggcggccaataccctggttgatgcgttttgccagcgagcgaagcaactgcatggttgagattgaagtggtgtttgccgctgaggatcgccaagtgttgttggcgttggcggttccgcctggcacgagcctgagggaggcagtccaagcatctggaatagctgcgcaatttccacagtgggggctcgccgagtgcccgctggggatttttggcagggtcatcgcggatcctgaagtgcgcgctgtacagtcgggtgatcgtattgagatttaccggcctttgttggctgaccccaaagaagtgcgcaggctgcgcgcggccaaggcggcaatgaacagaaagcaggattcataggtctgccgatcggcaggcaacaaaaagcccggcatgccgggctttttgctgagcgccgcaaagttactgcgggctggtgtccagaggctgtggcgacgggacaggaacagtttgcacgccgtcgacgtctttctggatcgtgtccagcaaggagcctggcttggccggtacctcggacttcggcttctcggcttcctgcgcaggcgcggtcacgttggtgccgttgtccttgccgagcaatgcttcatcacggcttacaccgggcatgaagtcaccagacaggctgacaagctggtcattgccattgaaaatgacgctgacgcgctcctgctggcgttcaccgccaccaggctggatgctgtagagataatcccagcgatcggcatggaaagtgtcggtcagcagagggttacccatgataaaccgtacttgccgtcgggtcattcccgggcgtaactggtctatcatgtcctgcgtgacgacattgccctgctggatgtcgattttgtaaaccccggggaatgaacaaccggcgagtgcgagcagtcccacaaaggtgaaactggttagcaagagcttggtgttttgcatcggtgggcgacttccactatcttggctgggacaacgtaaacgccgatcatacccgtattaagagaagctgcgaagcagcatccgcgagaaagctaaccatggttgaaaatagcgaactacgcaaagccggtcttaaagtgactctgccacgagtcaagattctacagatgctcgattctgctgagcagcgccacatgagtgccgaggacgtttacaaggcgctgatggagtctaacgaggacgttggcctggccacggtttaccgtgtgctgacccagtttgaagccgcagggctggtggttcgtcataatttcgacggcggtcatgcagtgttcgaattggctgacggtggtcatcacgaccacatggttgatctggataccaacgaggttatcgagttcaccagtccggaaatcgagaagctccagcaccaaattgctgaggagcatggcttcgatttggtggaccacaacctggtgctgtacatccgtaagaaaaagtaaaaaagctgcagatttgctctgcgcaatgatcgaaggcgacccaagggtcgccttcgtgctttctataagagagggaaatgccaggttaagccttggcagccacgaccatttttttcgcgtgggccagggactctttggtcaggtcgataccccccagcatccgcgccacttcttccacgcgttccgacttgttcagtttcgacacggcagtgtgcgttgcatcgctcccgcgtaccttgtgcacaaacaagtgctgatgtccttgggcggcgacttgcggcaagtgagttaccgtcagtacctggcctctatccccaaggcggcgcaacaactgcccaacgatttcggcggtcggcccgccaatccccacgtccacttcgtcaaataccagtgtcggcacccgcgaggtctgcgcagtaatgacctggattgccaggctgatccgcgacagctcgccgccggacgccactttggccaaggccttgagtggttggccggggttggcgctgaccagcagctccacctgctcaagcccatggggttgcagttcgttgctggcgttggtgcgtaattcgatggtgaagcgcccacctggcatgcccaaccgctgaatctcctgctccacggcgctggcgaggcccgtggcggcctgatggcgcaggtcgctcaactcgcgagccttctcttgatagtgacgagcaaaagaagcaagttcgtcgccgagccgctctatggattcgtcattggcgttcaaggtttcgatttcatccagcaacttctgctgcatcgtcgccacttcggtgggctggattctgtgtttgcgcgccagtgtataaatagtatccaggcgctcttcaatttcctgcaggcgcgccgggtcggcatcgaagtgatccaggaagcgattcaactctccaacggcttcttctacctggatttgcgcactggtcagcagggtcgtcgcttcgctcagcgagccggaaccgctgttcacgctggacagtcggttaaggctggccgtcagtgcattaaggacattgcctgaatcactctcgctgcattgctccaccacctggcggcaaatacccagcagcgtttcggcgttggtgaggtttttgtgttcctgctccaactgctccagctcggtttcacccagaccaaggctttcaagctcttcaagctggtaactgagcagttgatggcgtgcgcgttgctcatcgccggagttggagaggcgctccagttcctggcgcgtctgccgccagcgttgggcggccagttggacctggcgggcaaggtcggtggcgccagcgtattcgtcgagcaagcggcggtgagtgtcggttttgagcagggattggtgctcatgctggctgtgaatatcaatcagcaattcgccgagcgctttcaggtcgccgagagggcagggcgtgccgttgatatagccgcgcgaacgcccttccgccgtaatgacccggcgcaggatgcacgggccttcattattaaggtcgcgttcggccagccaggtttcggcttcggggatgtctgccaggtcgaaggtggcgaggatgtcggccttgtctgcaccggggcgcacgacgccgctgtcggcgcggtcgcccagggtcaagcccagggcgtcgagcatgatcgacttgccggcgccggtttcgcctgtgattacgctcattccgcgatccagttcgagatccaggtgttcaacaatggcgtagttatgtacggacaggtgcacgagcatgacggccgctcccaggctttaggtctggttatttatacagtgttttgtttgggcctgacaatcctggcgcttagctcgatttgcttgaactgcggttttatttagcgcaaaggggaatgagtaatgaggaattgatccgcgtcaccggaaagacttttggtaacgcctgcgcccttgaacctggaaattgtggccccatataccggaacagaagcgcgagttgagttcgcgcatgattttgaaaggagaaatctatggctgacgaacagacgcaggatacgcaaactccagacgccaactcggccgccggtgatgagctggcaactcgtgtgcaagtgctcgaagagcaattggctgctgcgcaggatcagtctttgcgtgttgccgccgatctgcagaacgtccgccgccgtgcagagcaggatgtagaaaaggctcataaattcgcgctggaaaaattcgccaacgacttgctgccgatcatcgacagcctggagcgtggccttgagttgtccagcccggatgacgaaaacatccgcccgatgcgcgaagggatcgaactgaccctgaaaatgtttcaggacaccctgaagcgttatcagttggaagcgatcgatccacaaggcggcgagccgttcaacgctgagcaccatcaagccatggccatgcaggaaagccatgaccttgagccgaacagcgtgttgaaagtgttccagaagggctaccagctcaacggtcgcttgttgcgcccggcaatggttgttgtgagcaaggctcctgcacctgttgcaccttctattgatgagcaggcttgaaatcagccgttacggccccatctataagtcaagcgtttaagtgctaccgcagttagccaccactgctgcggcaaccaaattaaagtttcgggagagttaatcatgggcaaaattatcggtatcgacctggggaccaccaactcctgcgtctccgtgctggaaaacggcgttgctaaagttatcgaaaacgccgaaggcgcgcgtaccacgccgtcgatcattgcttacgccaacgacggtgaaatcctcgtcggtcagtcggccaagcgtcaggcggtcactaacccgcacaacacgctgtacgcggtaaaacgtttgatcggccgtaagttcgacgaagaagtcgtacagaaagacatcaagatggtcccttacaaaatcgccaaggccgacaatggtgacgcttgggttgaagtaaacggccagaagatgtcgccgccgcaaatctcggctgaaatcttgaaaaagatgaagaagactgccgaagactacctcggtgaaaccgtcactgaagcggtcatcaccgttccggcctacttcaacgacagccagcgccaggcgaccaaagacgccggccgcatcgcgggtctggacgtaaagcgcatcatcaacgaacctaccgcagccgctctggcttacggcatggacaaggccaagggcgaccacaccgtgatcgtttatgacctgggtggcggtactttcgacgtttccgtgatcgagatcgctgaagttgacggtgagcaccagttcgaagtgttggccaccaacggtgacaccttcctcggcggtgaggactttgacattcgtctgatcgactacctcgtggacgaattcaagaaagaaagcggcatgaacctcaaaggtgatccgctggccatgcagcgcctgaaagaagccgctgagaaagccaagatcgagctgtcttccgctcagtcgaccgacgtgaacctgccgtacatcactgcagacgctaccggtcctaagcacttgaacgtgaaaatctcgcgttccaagctggaagcactggttgaggacctggttcagcgcaccatcgaaccttgccgcatcgcgctgaaagactccggtatcgacgttggctcgatcaacgacgtgatcctggtgggcggtcagacccgtatgccactggttcagaagctggtcaccgagttcttcggcaaagaagcacgtaaagacgtgaacccggacgaagcggttgccatgggtgctgccatccagggtgcggttttggccggcgacgtgaaagacgtgctgctgctggacgtcagcccgctgaccctgggtatcgaaaccatgggtggcgtgatgactgcgctgatcgagaaaaacaccacgattcctaccaagaaatcgcaagtgttctcgactgccgacgacaaccagggcgctgtgaccattcacgtgctgcaaggtgagcgtaagcaagcggcccagaacaagtctttgggcaagttcgacctggccgagattccaccagcaccacgtggcgtgccacaaatcgaagtgaccttcgacatcgacgccaacggcattctgcacgtcggcgcgaaagacaaggcgaccggcaaagagcagaagatcaccatcaaggccaactccggtctgtctgatgaagaaattcaacagatgattcgtgatgctgaagccaacgctgatgcagatgccaagttcactgagctggccggcgcccgtaaccagggtgatgctctggttcactcgacgcgcaaaatgatctccgaagcgggcgataaagtgaccgctgaagagaaaaccgcgatcgaagcggctgtagttgccctggaagccgctatcaaaggcgacgacaaggctgctatcgacgccaaggttgaggagctgtcgaaagtctccgcgccggttgctcagaaaatgtacgccgaacaaggtcagcctgctgacggcgctgcacaacacgcagagcctgaagccaagcacgacgacgttgtcgatgccgagttcgaagaagtcaaagaccagaagtaagttggtcgcccggttgaccgctatccagcggtgactggtaggatgtcgccgcgcgggagcttgctcccgcgttggcgtgtctggggtatgcgaatttttacaacatgcgacagcgttcgggtgttggcggtgtgatcgggaatgctcctgctttccgagcagtaaataccgcatttttggccgggtccctggctaaaaagtagtaatgaccaggatcgttgaattgacgtgagttgggtccgggcctgtattggggctcaacgagtttggcaaggctcaggagggtctggctgaacgtccttaagagtgcaaagacttatggcaaagcgtgactattacgaagtattgggtgtggagcgcggctccagcgaggcggacctgaagaaggcctaccgtcgcctggcgatgaagcaccacccggaccgtaatccggatagcaaagaatccgaagatctgttcaaagaggccaacgaggcctacgagtgcctgagtgatcccaacaagcgtgcggcctacgaccagtatggtcatgctggcgttgacccaagcatgggtggcggcggtgccggttttggtggtcagaacttctccgacattttcggcgacgtattcagcgacttctttggcggtggccgtggcggccagcgtggcggcgcccagcgtggcagcgacttgcgctataccctggaactgaacctggaagaagccgtgcgcggcaccagcgtcaacatccgcgtgccgacgctggtcaactgcaagccgtgcgacggctcgggtgccaagaagggctcctcgcctattacgtgcccgacctgtggtggtatcggtcaggtccgcatgcagcagggctttttctcggtgcaacagacctgcccgcgttgccatggccagggcaagatcatttccgatccgtgcgactcctgccacggcgaaggtcgcgtcgaagagtacaagaccctttcggtgaaagtgccggcaggcgtcgataccggtgatcgcattcgcctgtcgggtgaaggcgaggcgggtacacagggcggcccaacgggtgacctgtatgtggtgatcaatgtgcgcgagcactcgatcttccagcgcgatggcaagcacctgttctgtgaagtgccgatcagctttgtggatgcggcgctgggcggcgagctggaaattccgacgctggatggtcgggtcaagctcaagattccggagggtacgcagaccggcaagcaattccgcattcgtggcaaaggcgttgcgccggtgcgcggtggtggtgctggcgacctgatgtgtcgtgtggcggtggaaacgccggtcaatctgaaccgccgtcagcgtgaactgctcgaagaattccgcagttcgatggaaggtgatgactcccactcgccgaaaaccgcgggtttcttcgacggtgttaaacgcttcttcggcgatctgtaaggaataagtatgcgacgtatagccgtgatgggcgctgcagggcgcatgggcaaaaccttggtcgaggccgtgcagcagcgttcgccggcttccgggctgacggcggcaattgttcgtcctggcagcacgctgattggtgcggatgctggtgagttggcttcgctggggcgtatcggcgtttcgttgtcgggcaacctggagcaggtggctgacgagtttgacgtgctgatcgatttcaccctgccggaagtgatgctgaaaaacctggccttctgtcgcaaggccggcaaggccatggtgatcggtaccactggcttgagtgcagagcagaagcagttgctggtggaggcgggcaaggatattccggttgtcttcgctgccaacttcagtgtgggtgtgaacctgtcgctgaagttgctggatctggcagcgcgggtgctgggtgatgaggcggatatcgaaatcatcgagacccaccatcgccataaaattgatgctccgtcgggcactgcgctgcgcatgggcgaggcgattgccgatgcgctggggcgtgacctgtcgaaagtggccgtttacggtcgtgagggtcataccggtgcgcgtgcgcgtgacactatcggttttgcgaccgttcgcggtggtgatgtggtgggtgatcacaccgtgctgttcgctacggaaggcgagcgcctggagatcactcacaaggcctccagccgcatgaccttcgccaagggtgcggtgcgcgctgcgctctggctggaaggtcgcgagcctggcctgtatgacatgcgcgatgtgctggatctgcactgatcagtcgctaaaacgggggctaaagcttatgctttggccccgtttttaaccgctaggcgacgtcctgtcgcattcccctgcctttaaggctcattagcggtggaccaaaaaagcctttttctgtaagctacagctttagtgtgttcactaaaagcgcgcagaataattcagtgaataagcggagtgacgtgtccatacgtcactccgcttttttacacctgcgatcgccctttcaggctttatttacgggaggtcttcttgactaagccagccatactcgcccttgctgatggcagcatttttcgcggcgaagccattggagccgacggtcaaaccgttggtgaggtagtgtttaacactgccatgaccggctatcaggaaatccttaccgatccttcctacgcccaacagatcgttaccctgacctatccgcacattggcaataccggtactactccggaagacgtcgagtctgatcgtgtctggtcggcgggtctggtgattcgtgacctcccactggttgcgagcaactggcgtaacacgatgtcgctgtccgattacctgaaagccaacaacgttgtagcgatcgcgggtatcgatacgcgccgcctgacacgcatcctgcgtgaaaaaggctcgcagaacggctgcatcatggtcggtgacactatttccgaagaggcggcgattgccgcagcgcagggcttccctggcctgaaaggcatggacctggcgaaagttgtcagcgtcaaagagaagtacgagtggcgctccaccgtctgggacttgaagaccgacagccacgcgactgtcgaagcctccgagctgccataccacgtggtggcctacgactacggcgtcaaatacaacattctgcgcatgctggtcgagcgcggttgccgcgtgaccgtggtgccggcgcaaacgcctgccagcgacgtgctcgccctgcagccggacggtgtgttcctgtccaacggcccgggtgaccctgagccttgcgattacgcgatccaggcgatcaaggacgtgctggagaccgagattccggtattcggtatctgcctgggccaccagctgctggccctggcctccggcgccaagaccctgaaaatgggtcacggccaccacggtgccaaccacccggtacaggacctggacaccggcgttgtgatgatcaccagccagaaccacggtttcgcggtggatgaagcgaccttgccggctaacgtccgcgcaatccacaagtcgctgttcgacggttccctgcagggcatcgagcgcaccgacaagagcgcgttcagcttccagggccaccctgaagccagcccgggcccgaacgacgtagcgccgctgttcgaccgtttcatcaatgagatggccaagcgacgctgactgagcagcttgcgggcggccccggacccggtggcccccgcaggctcatcaaagattgttcaagacggcttgccgactgacctgcggatttgagtgacaaacccatgccaaaacgtacagacataaaaagcatcctgattctcggtgctggcccgatcgtgatcggccaggcttgcgaattcgactactccggcgcccaggcctgtaaagccctgcgtgaggagggctaccgcgtcatcctggtgaactccaacccggcgaccatcatgaccgacccggacatggccgacgccacctacatcgaaccgatcaagtggcagaccgttgccaagatcatcgagaaagagcgcccggacgcactgttgccaaccatgggcggccagactgcactgaactgcgccctggacctggagcgcgaaggcgtcctggaaaagttcggcgtagagatgatcggcgccaacgccgataccatcgacaaggctgaagaccgttcgcgtttcgacaaggccatgaaatccatcggccttgactgcccgcgctcgggcatcgcccacaccatggaagaagccaacgctgtgctcgagaagctgggcttcccgtgcatcatccgtccgtccttcaccatgggcggtaccggtggcggtattgcttacaaccgtgaagagtttgaagaaatctgcgcccgtggcctggacttgtctccgaccaaagagctgctgatcgacgaatccctgatcggctggaaagagtatgaaatggaggttgtccgcgataagaaggacaactgcatcatcgtttgctcgatcgaaaactttgacccgatgggcgtgcacaccggtgactcgatcaccgttgctccggcacagaccctgacggacaaggaataccagatcatgcgtaacgcctcgctggcggtactgcgtgagatcggcgttgaaaccggcggttccaacgttcagttcggcatctgcccggacacaggccgtatggtcgtgatcgagatgaacccgcgtgtatcgcgttcctcggcgctggcctcgaaagctaccggcttcccgattgcgcgtatcgcggccaagctggcgatcggttacaccttggacgagctgcagaacgaaatcactggcggcgctacgccagcgtccttcgagccgtctatcgactacgtcgtgaccaagctgccacggtttgccttcgagaagttcgccaaggctgacgcgcgtctgaccacccagatgaaatctgtgggtgaagtcatggccatcggccgtaccttccaggaatccctgcagaaagcccttcgcggtctggaagtgggtgtttgcggcctggacgagaagctcgacctgagcaatccggaaagcatgagcgtgctcaagcgcgaattgactgtgccgggcgccgagcgcatctggtatgtggctgatgctttccgcgccggcatgaccgtcgaacaaatcttcggcatgaacatgatcgacccgtggttcctggtacagatcgaagatctgatcaaggaagaagagaaggtcaagaccctcggtctgtcttctatcgaccgcgacctgatgttccgcctcaagcgcaaagggttctccgaccagcgcctggccaagctgctgggtgtgaccgagaaaaacctgcggacccatcgtcacaagctggagatcttcccggtctacaagcgcgttgacacctgcgcggccgagttcgccaccgacaccgcgtacctgtactccacttacgaggaagagtgcgaagccgcgccgtcgggccgtgacaagatcattatcctgggtggcggtccaaaccgtatcggccagggcatcgagttcgactactgctgcgtacatgccgctctcgccctgcgcgaagacgggtacgagaccatcatggtcaactgcaacccggaaaccgtttccaccgattacgacacttccgaccgtctgtacttcgagccggtaacactggaagacgtgctcgaaatctgccgcgtcgagaagccaaaaggcgtgatcgtgcagtacggcggccaaaccccgctgaaactcgctcgcgcactggaagccgccggcgtgccaatcatcggcaccagccccgatgccatcgaccgtgccgaagatcgtgagcgcttccagcaaatggttgagcgcctgaacctgcgtcagccgccaaacgccactgtgcgcagcgaagacgaagccatccgcgcagccagcaagattggttatccgttggtggtgcgtccgtcctacgtattgggtggtcgtgcgatggaaatcgtctacgaagaagaagagctcaagcgctacctgcgtgatgcggtgaaagtgtccaacgacagccctgtgctgctcgatcacttcctcaactgcgccatcgagatggacgtggatgcagtctgtgacggtactgatgtggtgatcggcgcgatcatgcagcacatcgaacaagcgggcgttcactctggtgactccgcatgctcgctgccgccgtactcgctgccggcgcacatccaggacgagatgcgcgaacaggtcaagaaaatggccctggaactgggtgtggtcggcctgatgaacgttcagttggcgctgcaaggcgaagacatctacgtcatcgaagtcaacccgcgtgcttcgcgtaccgtgccatttgtttccaagtgcatcggtgtgtccctggccatgatcgctgcgcgcgtgatggccggtaagaccttgaaggaaatcggcttcaccaaggaaatcattccgaacttctacagcgtgaaagaggcggtgttcccattcgccaaattccctggcgtggacccgatcctgggcccagagatgaagtccaccggtgaagtgatgggcgtgggtgataccttcggtgaagccttcgccaaggcccaaatgggcgccagcgaagtgttgccgaccggcggtactgcgttcatcagcgtgcgcgacgatgacaagccgctggttgcaggtgtggcccgtgatctgatcaacttgggcttcgaagtcgtggccactgccgggaccgccaagctgatcgaagctgccggcctgaaagtgcgtcgcgtgaacaaggtgacggaaggccgtccgcatgtggtcgacatgatcaagaatgacgaagtcacgctgatcatcaacaccaccgaaggtcgccagtcgatcgcggattcttactccattcgtcgtaacgccttgcagcacaagatttactgcaccactaccattgctgctggcgaagccatctgcgaagcgctcaagttcggtccggaaaagaccgtgcgtcgcttgcaggatctacacgcaggattgaaggcatgaccaaatacccaatgaccgtccagggcttcaaggccctggaagaggagcacgctcacctgaccaaggtcgtccgtccaaagctgagccaggacatcggcacggcccgtgaactgggtgacttgaaggaaaacgccgaataccatgctgcccgcgagcagcagggtatggtcgaggcgcgtatccgtgatatcgaaggtcgcctgcagaattcggtggttatcgacgtgacgaccattccgaagaccggcaaggtgattttcggcaccaccgtggaaatcgccaacgttgaaaccgacgaaagcgtggtctatcacattgtgggtgaagacgaagctgactttaaactcggcaaaatctccgtcggttcgccgcttgcccgtgccttgattgccaaggaagagggtgatgtggtggttgttaaaacacctggtggcgtgaccgagtacgagattgttgaagttcgtcacatctgaaaggcggcgcccgcttcgtgcgggcgccatgctttggcagctctcccagatgctttgggtcggcggcctgtggctgttgcacattggtgttttgccggcgttgggcctgattggcttggcgccgctactgatcgatgagatcgacggattgctcagtgcgttgctggtaggttttgcggcggcgtgcgtgacgctccaggtgctggtgctgatcaaggctgaaggcttggggagtttgtggcgggatattcgcggccaactgctgttgatggcgctgtatgcgtgcgcaatgttttgcgtcgtgcatgtctggctgccggaagcgttgcgctggcagttattcagctatcttgtgctagggttctccggcctggtgctggtgatacagccggcgccgggatggagtggcagggcgcgcgaagcacgcccgtgacccttgttgtcatttgaaagctattacttgaagcggtgtacgttcgacagttgcttgttgacgctgaagttcttgcgatacagcagcgccatcttgccgatgacctgaaccaggtccgctttgccaaccttgcacaattctgcaatggcagccaggcgcgcttcgcggtcgaggatgttgaccttgatcttgatcagttcatgatcgttcagtgcgcgttcgaattcggctaacacaccttcagtcaaaccgttgtctgccacaatcagaactggtttcagatggtggccaatggatttgtactgtttcttctgctcttgagtgagcggcataatctgacccctgcgtctgatcttgtaaaaagcggcggtcagtttacccgagcgagtccgggaccgcccagttaatcacgacccgttttatttttcgaggtggcccgtggcccgttccaaaaccagccttaagtggctacaagaacatttcaacgacccttacgtcaaaaaggcgcaaaaggacggctaccgttcccgggccagttacaagttgctggagctgcaggacaaggacaaattgtttcgtcctggcatgagcgtgatcgatctgggcgcggccccgggtggctggtcccaggtggccagtcgtctgattggtgggcaaggccgattgatcgcgtctgacatccttgagatggacagcatcccggatgtcaccttcgttcacggtgactttacccaggacgccgtattggccgagatcctggaagctgtgggaaattcgcaggtagaccttgtgatttccgacatggcccccaatatgagtggattaccggctgttgatatgccgcgagccatgttcctgtgcgagttggcactggatttggcaggtcgggtattgcgtccgggtggtgatttcctggtcaaggtcttccagggtgaaggcttcgacgagtaccacaagaacatccgcaagctgttcgacaaggtgcagatgcgcaaaccggactcttcccgggaccggtctcgcgagcaatatctgttggcgcgggggttccgtggcatcgaaggcgccgcgagtgatgagcgtctttaagggttttaagggaggcgataggtttttttatatcgctttcgtcacgaagctttacgaatattgtgtagtcaaagtttcacaaagggttacagacggcgcctgccagagttgtaggtaatgtagtaagttaggccggtgaatatcatgcgaagcgcgcgccagtagcggagcttgcttcagagggtagttaattgaacgatatggcaaagaatctgatcctgtggttgatcatcgcggctgtcctggtgacggtgatgaacaacttctccagccctaacgagccgcagaccctcaactattccgacttcatccagcaagttaaggatggcaaggtcgagcgcgtagcggttgatggctacgtgattaccggcaaacgcaacgatggcgacagcttcaagaccattcgtccggccattcaggacaacggcctgatcggcgacctggtggataaccacgtagtggttgaaggcaagcagcctgagcagcagagcatctggactcagcttttggtggcgagcttcccgattctggtgatcatcgctgtgttcatgttcttcatgcgccagatgcaaggtggcgcggggggcaagggcgggccgatgagcttcggcaagagcaaggcgcgcctgctctccgaagatcaggtcaaaaccacgttggctgacgttgccggttgtgacgaagccaaggaagaagtcggcgagctggttgagttcctgcgtgacccgggcaagttccagcgtctgggtggccgcattcctcgcggtgtgctgatggtcggtcctccgggtaccggtaaaaccttgctcgccaaggcgattgccggtgaagccaaggtgccgttcttcaccatttcaggttctgacttcgtcgaaatgttcgtcggcgtcggcgccagccgtgttcgcgatatgttcgaacaggccaagaagcatgcgccatgcatcatcttcatcgacgaaatcgacgccgttggtcgccatcgtggtgccgggatgggcggtggtcatgatgaacgtgagcaaacgcttaaccagttgttggttgagatggacggtttcgaaatgaatgacggcatcatcgtcattgccgcaaccaaccgtccggatgtactcgacccggccctgctgcgtccaggccgtttcgaccgtcaggtggtggtgggcttgccggacattcgtggtcgcgagcagattctgaaagtgcacatgcgcaaagtgccaatgggtgatgacgtggctccagccgtgattgcccgtggtactccaggcttctctggtgctgacctggccaacctggtgaacgaggcttcgttgttcgctgcccgtaccggcaaacgcatcgttgagatgaaagagttcgagctggcgaaagacaagatcatgatgggcgccgagcgcaaatccatggtcatgtccgagaaagagaagcagaacaccgcttatcacgaagcaggccacgccattgtgggtcgcgttgtgcctgagcatgacccggtctacaaagtgtcgatcattcctcgtggtcgcgctctgggtgtcaccatgttcctgcctgaagaggatcgttacagcctctccaagcgtgcgttgatcagtcagatctgttcgttatatggcggccggatcgctgaagaaatgacgcttggctttgacggtgtcaccacaggcgcttccaacgacatcatgcgtgccagccaaattgcacggaacatggtgaccaagtggggcttgtctgaaaagctcggtcctttgatgtatgccgaggaagaaggtgaggtattcctgggtcgtggcggcggtggtcaaagtgccagcttctccggtgagacagccaagctgatcgattctgaagtgcgcagcatcattgatcagtgctacggcacggccaagcagatcttgaccgacaaccgcgacaagctggatgccatggctgacgctttgatgaagtacgagacgattgatgccgatcagatcgacgacatcatggcagggcgcgcgccgcgtgaacctcgcgattgggagggtggttcgggtacctcgggcactccccctgtcgttcaaaacgagcgcccggaaaccccgatcggcggcccggcggctgagctctaaggtttgaaatgacttctgctttatcctccacccggttgccttgcggcaaccgggttcttgatttggcccggacgcacgtcatgggcattcttaacgtaacccctgattccttctccgatggcggtcgcttcagccagttggatgctgcgctgcgtcatgccgagtcgatggtattggccggtgcgaccttgattgatgtcggtggcgaatccactcggcctggagcgcgtgttgtttctcccttggaggagttggagcgcgtggcgccgatagtcgagcgtatcgcccgcgagcttgatgtcattatttccgttgatacatcaacacctgctgtcatgcgtgaaacggcgcgtctcggcgccgggttgatcaatgatgtgcgctctcttcagcgcgacggcgctcttgatgctgcagcggccacggggctgccggtttgcctgatgcacatgctgggagagcccggtaatatgcaagacagcccgcactacgatgatcttgttggtgaggtgagtgggtttctcgcggagcgaattgctcagtgtgctgcggtgggcataacccccgagcggattatccttgatccagggtttggttttgccaagaccctgcaacacaacttaagcctgtttaagcacatggaatccttgcatgcccttggtcgacctctgttggtcggtgtttcgcgcaagagcatgatagggctggccttgaatcgccctgtgggcgagcggttgtatggtgggcttgcgctcgcggcacttgcggtggccaaaggtgcgcgcatcttgcgcgtgcatgacgttgccgagaccgtggatgtggttcgcatgattgccgctgtagaatccgccgaataagaatgatggagtacttatgactaaaaaatactttggcaccgacggtatccgtggtcgggtcggcgagtttccgattactcctgatttcatgctcaagctggggtgggcagcaggcatggcgttccgcagcatgggggcgtgccgcattctggtgggtaaggacacccgtatttccgggtacatgtttgagtccgcgctggaagccgggttgtccgctgcgggtgccgatgtaatgctgctcggtcctatgccgacgcccgcaatcgcctacctgacgcgtacctttcacgctgaagccggtatcgtgatcagcgcctcgcataaccctcatgatgacaatgggatcaagtttttctcggggcagggcaccaagctgccggacgagatcgagctgatgatcgaagagttgctggatgcgccgatgacggtggttgagtccagcaagttgggtaaggtttcgcgtatcaacgatgcgtccggccgctatatcgagttctgcaaaagcagcgtgccgaccagcaccagtttcgccgggcttaagattgtcgtcgactgtgcccatggtgcgacttacaaggtagcgccgagtgtgttcaaggagttgggcgcggatgtgacggtgctgtcggctcagccgaatggcctgaacattaatgataactgcggctcgacccacatggagcagctgcaggcagctgtcctggccgagcatgctgacctgggtatcgccttcgatggtgatggtgatcgtgtccttatggtggatcacacgggggcggtggtagatggtgatgatctgctgttcatcattgctcgcgacttgcatgagcgtaacaagctgcaaggaggggtcgtcggcacactgatgagcaatcttgggcttgagcttgctttggaggcgctgggcattccttttgtgcgcgcgaatgtcggtgatcgctacgtgattgccgagttgttggagcgtaattggctggtaggtggcgagaactccgggcatgtcgtctgcttccagcacaccacgacaggcgatgcgatcattgctgcgctgcaagtgctgttgtcgttgcgtcgtcgcgaagagagcctggctcaggcacgccaggctttgcgcaagtgcccgcaggtgttgctcaatgtgcgtttcgccggtggcgaaaatccaattgaacaccctgctgtcaaagacgcctgcgagcgtgtgactctggcaatggcagggcgtgggcgggtattgctgcgtaagtccggcacagagcctctggtgcgcgtcatggtcgaaggcgaagacgaagcacaggtccgcgggcatgccgaagacctggcaaaactggtaactgaaatttgcgcctgaattcggcttgccagtgatgatggggttgggtaacatctgcgcccactttgaccgacgaggtacagcatgcgtcgcactatggtagctggtaactggaagatgcacggtacccgcgccagtgtcgctgagctgatcaatggccttcgtcacttggccttgcctagcggtgttgatgtcgcggtttttccgccttgcttgcatatcaaccaagtggttgatggcttgaaaggcaagtcgattcaggtcggcgcgcagaattctgcggtggagccgatgcaaggtgcgttgaccggtgagatttcaccgagtcagctggttgatgcgggttgttcctatgtgcttgtcgggcactccgagcgccgtcagatgatgggcgagcgtgacgggacactcaatcgcaagttcgcagcggcacaggcttgtggcttgattccggtgttgtgcataggggagaccctggagcagcgtgaatcaggcaaaactcttgaagttgtctcgcgtcagctgggcagcatcatcgaggagctgggtgtgggtgcgtttgcaaaggcagtgattgcttacgagccggtctgggccattggtaccgggctgactgctacaccgcaacaggcgcaggatgtgcacgcagccatccgcgcgcagttggcggcagagaattctgaggtcgcgcaaggtgtgcggcttctatacggcggcagcgtgaaggcggccaatgcggtcgaactgttcggcatgccggatatcgatggggggctcattggtggagcttccctgaatgcagatgagttcggtgcgatctgtcgcgccgcgggaaactgaaaaaatgctggaaacagtcgtagtcgtttttcatctgttggctgccctgggcgtagttgccctggttttgttgcaacagggtaaaggtgcggatgctggtgcgtctttcggtgcaggtgcttcaaatactgtgttcggaagccaaggttcctctacctttcttagtaagtttactgctatacttgccgcaggtttcttcataaccagcttagggttaggttactttgctaaagagaaagctcatgtgctgactcaagtaggtttgccaaatccagcagtgttggaagttccaaaagcaaaaccggcttctgatgatgtcccggtgcttcaagagcaaaagtcggctactccagcgactgacgtgcctccagctcaagagcaaaagtaagaagggttgtaaacgctgtattgccgaggtggtggaattggtagacacgcaaccttgaggtggttgtgcccatagggtgtaggggttcgagtccccttctcggtaccaattatcaggagagcccgctgttgcgggctttcttgtaggtggaaggttacattgaccctgtaagggatcggtcgtatacttccgccccagctttgtcgcggggtggagcagtctggtagctcgtcgggctcataacccgaaggtcgtcggttcaaatccggcccccgcaaccagttttacggagccccttttaaggggctttttgttagctggacactttcaacgccgctgttcgacggcgtttcaaggatgggcgtttcgcccatttttttattttgcacagcatgcacatacatgcacgagggggttcaggtgtcgagcaagctagaagagttgcaggccttgttggccccggtggtcgtggccctaggctatgaatgctggggtattgagttttcggctcaaggtcgccactcaatgttgcgcgtttatatcgataaagagggcggcgtgctggtggacgattgtgccattgtcagccgtcagatcagcggtgtcctggatgttgaagatccaatctccgttgaatacaccctcgaagtttcctcgccaggcatggaacgcccactgttcactattgatcagtttgcaaaatttgccggtgaacaagtgaagatcaagctgcgatctccctttgaagggcggcgcaactttcagggccttctgcgcggtgtagaagaacaggatgtcgtggtgcaggtagaagaccatgagttcctgttgccgatcgatatgatcgacaaggccaacattattcccagttttgactgagacgcggatcccgcggatccaatggcttgcgaaaggcgaggcgtacgatgagcaaagaagtactgctggttgttgagtcggtatccaatgaaaagggcgtaccggcaaacgtgatttttgaagcgctggagctggccttggccactgctaccaaaaagcgttttgaagacgaagttgatctgcgtgtggaaatcaaccgccacaccggtgcctatgagactttccgtcgctggacggtcgtcgaagaggccgatcttgatgatccggctatcgaaacctggccgagcaaggttgccgagacgcaccctggcgccagcgtcggtgacgtcgtcgaagaaaagatcgaatccatcgaattcggccgcatcgctgcacagaccgccaagcaggtcatcgtgcagaaggttcgcgaagccgagcgcgctcaagtcgttgacgcctatcgcgaacgcctgggtgaaatcatctccggcaccgtgaaaaaagtgacccgcgacaacgtgatcgttgacctgggcaacaacgccgaggcgttgctggctcgcgaagacatcatctctcgcgaaaccttccgtgtcggcgtgcgtttgcgggcgctgctcaaggaaatccgcaccgagaaccgtggccctcagttgatcctgtcgcgtaccgcgccggaaatgctgatcgagctgttccgtattgaagtgccggaaatcgcggaagggctgatcgaagtgatggccgcctcccgtgacccgggttcgcgcgccaagatcgcggttcgctccaaagacaaacgcatcgacccgcagggcgcttgcattggtatgcgcggttcgcgcgtccaggcagtgtcgggcgaattgggcggtgagcgtgtggatatcgtgctgtgggacgataacccggcgcagttcgtgatcaacgccatgtcgccggctgaagtggcggcaattatcgttgacgaagatgcccatgcaatggacatcgccgttggcgcagacaatctggctcaggccattggtcgtggtggtcagaacgtgcgtctggccagccaactgaccggttggaccctgaacgtgatgaccgaatcggacatccaggctaagcagcaagctgaaaccggtgacatcctgcgcaacttcatcgacgagttggaagtcgacgaagacctggcgcaggtgctggtagatgaaggcttcaccagcctggaagagattgcctacgtaccgttggaagaaatgctcaacatcgacggctttgacgaggacaccgtcaacgagcttcgcgctcgggccaaggatcgtttgttgactaaagccatcgctactgaggaaaagctggcagacgcccatccggccgaagacctgctctcgcttgagggtatggacaaggatttggcgatggaactggcggtgcgcggcgtaattacccgcgaagacctggccgagcagtctattgacgatctgctcgacatcgacggcattgacgatgatcgtgccggcaagttgatcatggccgcccgagcccattggttcgagtaactaggcgcggcctgaggagagaagtgcatgacgcaagtcacggtgaaacaactggccgatgaggtcaaaacaccggtagagcgcctgttgcagcagatgcgtgaggcaggtctgccgcacaccgccgccgatgaaggtgtgagcgacagtgagaagcagtctttgctgactcacttgaagagcagccacaaggcgaaagtggaagaaccgcgcaagattacattgcagcgcaaaaccaccagcaccctgcgtgttgctggtagcaaaagcatcagcgttgaagtacgcaagaagaaagtcttcgtacagcgcagcccggaagaaatcgaagccgagcgcaaacgcgagctggaagaacgtcgcgcagtagaaaatgctgctcgtcagaaggctgaagaagaagccaaacgtcgcgccgaagaagaagcgcgtcgccagcctgctgctgcgcaacctgcttccactgaggcggtcgcagcgcctgttgctcctgttgaagctgtgcgtgaggccgctccggtcgccgctgcacccgctcctgcagctgagcgcaagcgtgacgaaccgcgtcgtccggacaaaccacgcgctgacgataacaatcgtcgcggcggtggtggcgatggcgagcgtaaaaacgctccgcatcgtgcttcggtcaaagagaaagcgcctgctccacgtgttgccccacgtactaccgacgaagaaagcgatggcttccgtcgtggtggtcgcggcaaggccaagctgaaaaaacgcaacgcccacggtttccagagcccaaccggccctgtcgtgcgtgaagtgaagatcggcgagaccatcactgtgggcgatctggcccagcagatgtcggtcaaggctgctgaaatcatcaagttcatgttcaagctgggcactccggccaccatcaaccaggtactggatcaggaaactgcccagctggttgccgaggaactgggccacaaagtgaccctcgtcagcgacacagccctggaagattccctggccgagtccctgaagtttgaaggcgaggcagtttcccgtgcaccggttgtgaccgtaatgggccacgttgaccacggtaaaacttccctgctcgactacatccgtcgtgccaaggtagctgcgggcgaagccggcggcatcacccagcacatcggtgcataccacgttgaaaccgagcgcggcatggtcaccttcctcgataccccaggtcacgccgcgtttactgcgatgcgtgcccgtggtgccaaggcgactgacatcgtgatcctggtcgttgcagcggacgacggcgtgatgccgcagaccattgaagctgtccagcacgccaaggctgccggtgttcctctggtcgttgccgtgaacaaaatcgacaagccgggcgcagatcttgatcgcatccgtagcgaactgtcggttcacggtgtgacgtctgaagagtggggcggcgagacgcctttcgtatcggtctccgcaaaaatgggtaccggtgttgacgagctgctcgaagccgttctgttgcaagccgaggttctggaactgactgctactccatcggctcctggccgtggcgttgtggttgagtcccgtctcgacaagggccgtggtccggttgcgaccgttctggttcaagacggtaccctgcgccaaggcgacatggtgctggtcggttcgaactacggccgtgtacgtgccatgctcgacgagaacggcaagccaatcaaggaagccggtcctgctatcccggtcgagatcctcggcctggacggtaccccggacgctggcgacgagatgagcgtagtggccgacgagaagaaagcccgtgaagtggctctgttccgtcaaggcaagttccgcgaagtcaagctggcccgtgctcacgccggcaagctggaaaacatcttcgagaacatgggccaggaagagaagaagacgcttaacatcgtcctcaaatctgacgtacgtggttctctcgaagcgttgaacggcgccctgaacggcctgggtaacgacgaagtgcaagtgcgcgttgtcggtggcggtgtcggtggtatcaccgagtctgacgccaacctggcactggcttccaacgctgtactgttcggcttcaacgtgcgtgccgatgccggcgctcgcaagatcgtcgagcaggaaggcctggacatgcgttactacaacgtcatctacgacatcatcgaagacgtcaagaaagcccttaccggcatgcttggcagcgacgtccgggagaacatcctgggtgtggccgaggtgcgtgacgtgttccgctcgccgaaattcggtgcgatcgccggttgcatggttattgaaggtaccgtgtaccgtaaccgtccaatccgtgtactgcgtgaagacatcgttatcttcgaaggcgagctggaatccctgcgccgcttcaaggatgacgcttctgaagtacgtgccggtatggaatgcggtatcggcgtcaagagctacaacgacgtcaaggctggcgacaagatcgaagtctacgagaaggttcaggttgctcgcagcctctaactcgcgcacttccggagccacgcggcgtgtgggcatgcaaatgccccgcgcagcgtacggactctaaacgcaacgcccggtctggcttttgtcaggccgggcgtttgccgctttcagaccccacgggtttcaccgtgtggcagtaacaggtaacaagacatggcaaaagaatacagccgtacccagcgtatcggcgatcagatgcagcgcgagctggcccaactgatccgtcgcgaagtcaaagacccccgtgttggcctggtcaccatcaccgccgttgaagtgagccgtgacgtgggtcacgccaagatcttcatcaccgtgatgggtcaggacaacagcgaagaaattgcacaaagcatcaaggtgctcaactccgccgccggtttcctgcgtatgcagttggcccgcgaaatgaagctgcgcagtgttcctcagttgcacttccactacgacgaaagcgtcgtgcgtggtgcgcacctgtcggcactgatcgagcgcgccgtggctgaagacagccagcacccgtccacacctgaagacgccaaggagtaagcggtggctcaggtcaaacgtattcgccgcaatgtcagcggcatcattctgctcgacaagcccattggctttacctccaatgccgcgttgcagaaggtccgctggctgctcaatgccgaaaaggcagggcacaccggcagtcttgatccattggccactggcgtgttgccactgtgctttggcgaggccaccaagttctcgcaatacctgctcgattccgacaagggttatgaaaccctgatgcaactgggcaagaccaccaccacggccgacgctgaaggtgatgttttgcaggttcgtgacgtgaccgttggtcgtgctgacatcgaagctgttttacccgcttttcgtgggcaaatcagtcagataccgccgatgtactcggcactcaagcgtgatggccagcctctttacaagttggcacgtgcgggcgaagtagtggagcgtgaaccgcgttctgttactattgcgcggcttgaattgctcgccagtgagggcgacaccgcccgattgtcggtggactgcagcaaaggcacctatattcgtaccctggtggaggatatcggtgagcaactgggctgtggcgcatacgttgcagagctgcgacggactcaagccggacctttcaccctggcccagacggtcacgctggaagagttggaagcggtacatgccgaaggcggcaacgaagcagttgatcgcttcctgatgccatcggacagcggtttgctggattggccattgctgcacttctcggagcacagcgcgttctactggctcaacggccagccggtacgtgccccggacgctccgaagttcggcatggtgcgggtacaggatcataacggtcgcttcatcggtatcggtgaagtgagcgaagacgggcggatcgcgccgcgtcgactgattcggtcagaatgaccgaacgagtgtggctgttaacaggcacggtcaacactcatttttagatacagggatttgtccctggcctgttgaaaccgccctttgggtggtttcctgaaaaaaggattgcctcatggctctcgacgttcaagaaaaagcacaaatcgttgctgactatcagcaagctgttggtgacactggttcgccagaagtgcaagttgcactgctgacccacaacatcaacaagctgcaaggtcacttcaaggccaacggtaaagatcaccactcccgtcgtggtctgatccgtatggtaaaccagcgccgtaagctgctggactacctgaaaggcaaggatctgggtcgttatcaggctctgatcggtcgcctgggtctgcgtcgctaataagcgattgcgctagaggttggttgtctgccgtgtgtcagtgggattcccgctggctcatggtaggctcccagcctcaagttttatctggatacacgttttacccctggacctggttcgggccgattcccgacattgcccaagaatttcgcaagaagacaagttcccccaagagccacaaagaaggtaggacaccgtgaacccggttatcaaaaaattccagttcggtcagtcgaccgttaccctagagacaggccgtatcgcccgtcaagcctccggcgcagtgctggtcaccgttgacgacgacgttaccgtattggtgaccgtggttggcgccaagaccgctgacccaagcaaaggctttttcccactgtccgttcactaccaggaaaagacttacgctgccggtaagatccctggcggtttcttcaagcgcgaaggccgtccttccgagaaagaaaccctgacttcccgactgatcgaccgtccgatccgtccgctgttcccagaaggcttcatgaacgaagtgcaggttgtctgcaccgtcgtttccaccagcaagaagaccgatccggacatcgctgcgatgatcggtacctcggctgccctggccatctccggcattcctttcgatggcccgatcggcgctgcccgtgttgcgttccacgaaagcaccggctacctgctgaacccgacttacgagcaacagaaagcatcgagcctggacatggtcgttgccggtacttcggaagccgtgttgatggttgaatcggaagccaaagagctgaccgaagaccagatgctgggcgcggtactgtttgctcacgatgagttccaggttgtgatcaacgctgttaaagaattggcggccgaagcggccaagccaacctgggcctgggctccacaagctgaagccaccgaactgctgggcgctatccgctccgagttcggcgctgccatctccgacgcctacaccatcaccgtcaaggccgaccgttacgctcgcctgggcgagctgaaggatcaggttgtcgccaagctgtccggtgaagaaggtcagccttcttccagcgaagtcaaagcggctttcggcgaaatcgaataccgcaccgttcgcgaaaacatcgttaacggcaagccacgtatcgacggtcgcgacactcgcaccgtgcgcccgctgaacatcgaagtcggcgtgctgccgaagactcacggttcggcgttgttcacccgtggtgaaacccaggctctggtcgttgcaacgctgggcaccgcccgcgatgcacagctgctggacaccctggaaggcgagaaaaaagacccgttcatgctgcactacaacttccctccgttctcggtaggtgagtgtggccgcatgggtggcgctggtcgtcgcgaaatcggtcacggccgtctggcccgtcgctcggttgcagccatgctgcctgccgccgacgtgttcccgtacaccatccgtgttgtgtcggaaatcaccgagtccaacggttccagctccatggcttccgtttgcggtgcttccctggcactgatggacgctggtgtgccgatgaaggcgcccgttgccggtatcgccatgggcctggttaaagagggcgagaagttcgccatcctgaccgacatcctgggcgacgaagatcacttgggcgacatggacttcaaagtagccggtacctctaaaggtgttaccgcgctgcagatggacatcaagatcaagggcatcaccgaagagatcatggagatcgccctgggccaagccctggaagcgcgcctgaacatcctcggtcagatgaaccagatcattggtcagtcccgcaccgagctgtcggaaaatgctccgaccatgatcgcgatgaaaatcgacaccgacaaaatccgtgatgttattggtaaaggtggcgcgaccatccgtgcgatctgcgaagaaaccaaggcttcgatcgacatcgaagacgacggttcgatcaagatcttcggcgaaaccaaggaagcggctgaagctgcacgtcagcgcgtcctgggcatcaccgctgaagccgaaatcggcaagatctacgtcggtaaggttgagcgcattgtcgacttcggcgcattcgtcaacatcctgccgggcaaagacggtctggtgcacatctccatgctgagcgacgctcgtgttgagaaagtgaccgacattctgaaagaaggccaggaagtggaagtgctggtactggacgtggacaaccgcggccgtatcaagctgtccatcaaggacgtagcagcagccaaggcttcgggcgtttaatcaccccgggcttcaagctgaaaaaaaggactcttcggagtcctttttttgtgggcgcaggaaagtgcagagaaatcatgcgtttaattaaagtcaaaagccgcaacttgcatgcaggcacgatggggttcatgcaagttgcacgattccgaaaattgggagtttttataacttgttgttttgtaaggatttaatctctgtacaagacttggcacactgcctgcaataaccctgttaacgctgcagcatcaaggtccacacgctgcagactttttataaaacaggagttactcgtatgaagaagttcgctctcgctactgctaccgctctgactctggccatgggtgctaacgtagcctttgctcagacttcccaagcccctatgacgttggcggcaggtgaagctaccaaggctaaggaaagtgtttcggatacctggatcaccaccaaggttaaatccgacctgctgaccgagaagggcattcctggttcggacatcaaggttgaaaccaacaaaggtgtggtttccctgtcctcgacagttgctatctctgattcgcagaaagccactgccgtagcgatcaccaagaaaatcaaaggcgtgactgcagtttccgctgatggcctgctggccggtggcgcagttaaagctgacaacatcgacaaaaccaaagatgccacttccgatacctggatcaccaccaaagtgaaggctgacctggtaaccgagaaaggcattcctggtaccgacatcaaagtcgaaaccaacaagggtgtagtttccctgtcctcgtctgtcgcagtaaccgaagcacagaaaacgactgcggtgaacatcaccaagaaaatcaaaggcgttaaagctgtatcggccgacggcctgaaagcgcagtaacgctccacgtttcgtctgaactggacggcggcggctcagggtgagttagatatccacccaatgcacctctggagttcatgcgaccgaccacatggatgtggtcattacaggccccggcacttgtgtcggggcctgttctattgtgggttggaacatattcgtcagatcaacaaaggctcttgtgggagctggcttgcctgcgattgcatcacctcaatccagctgaacaccgaggtgtctgcatcgcaggcaagccagctcccacaggtggagaggtgtggcggaggagttattcggcatccagatgcatcggtgtcaccactcggccatctttctccgcctgccccaggttggcgtcaatgaaatatacccggtcgtcttccagctgccctttatctaccaggtaatccttgatggcgctggcgcggtcctggcccaactggcgcagcaagacgtcactggcaccccagaatttgatcaagccatcacgcagcttcgccgtgcggtcgtcgctactcaggtctttccattcggctggcggctgttgtttcagacgggttcggtagatgccttcgagcaaaggcgctttttccttctcaggaaccaccagcaacgatgcctgggccggaaccttgtcaccacggcgctgaaggatcttgtagtagttgtactggtattcacgttccagacgttcagcggcgatgaacgggccgtcgctgctcgcagccgccgtgccttcgatttccagacgcagggtagggcgctctttgagtgccttggccagggtgttcagggcaccttcagcgtccttgctcagctcgctggaacctgccgcgaaggacacgttgcccaagtcctctgagccaccgccggtaatcagcccgccaatgaacttgaagggcgccgttgccgcgcgcaccaccagattacgcagggtttgccacacaatcggcatcacgctgaattgtgggttgttcaggtcaccggtcaccggcagctcgatggagatcttgccgtcagtgtccttgagcaacgcgattgccaggcgaatcggcaagtccacggcatcggcgctgtcgactttctcacccagttgcagttgttcaaccaccactttgttctcggccttcaattggcctttggtgatcacgtagtgcaggtcgaggttgagacggcccttgcggatgcggaagccggcaaatttgcccgagtacggcgtcagtgtcgtcaactcgacccgtttgaagctggtggcgatatccagcgccgccatcgggtcgaacgggttcacactgcctttgatggtcaccggcgcgtaacgatccaccttgcctttgatgtcgacactggccggtttggcctggcgactgtcaatggtgccgatctgcccgttgagctgttgaatcgcggtggcgaagttgggcgtaaggctgaagtcggcaaagttggccgagccgtcgttgatcgcaatctgaccgatatgaatgcctagcggcttgtctttgctcgccgcaggcttggcggccgatttgacaccactgtcggcgggttgaggaatcagcaggtcatcgacgttggtggtgcggtcatcgttgatcatgaagcgtgcatacggctgcagaaggttgaccttgtcgatcgacaggctgtcgccatgctgataattcacgccctcgagtaccaggcgctgccatttgagaaagtcgcgggtcttgagggtgtccagcgtgtgcaactggtcaacctgcgcacggccggtcacttgaagcgccaggggctcggtacttttcaggttcacgtccaggttgctgccgagcatgccgctgcgcagttccaggcgaataaacgggctgatgtaggcctgggcaacccgcaggtcgatgtcctgggtgttcactttcaatttggcgctgatcgggttgaggttgacctcgccggtcgcctggatcttgccctgtttgcccaggccggtatcaaccttcagagtgaaggggctgccgttgaggctgtcgaagttctgcacgtcaacattcagcggacccagttccagcgcaacctcgggtttgacctggcggtcggccaggtgcacttgatagttgcgcagttgcacatccttgagcagcacttgccagggcttgctcggggccgcaggctctgccttgggcgaatccgcggtggcaggcgccgtggcgggctccggcttcttggtcggtttgctgggctggctggcgaacagcttctgccaatccagctggccgtcggcttcacgggcggcccaggtttccagcttgttgctgcgaatcttgccgaccaccacttgctgcttggccaggtctaccgtggtgtcgctgacgtccagacgttccaggcgtaccaacggccggccatccggcgccttgatggcaaacggcgcgatgctggcggtggtgtctgtcaggttcagctcggtttctttggccaggctgaatttatagcgggtgctgaaattcagcacgccgtcttccagcaccagtggcagtgcatcgcgcacatacggccaccaggctttcatcttgccgtcggtgactttcagcgtgccctcggaggtgatcggcaccaggctgaaattacctttccagtcgatctgcccacccgcagggcctgcggccaccagggtcatatcggcgttgtcttgtggcaaggtgctgaggtttttcagctcgaagtcgagtttgtcgtagagaaattcaatgggttcgctgggacgcaggtcctggaaatgcacatagccgccggccagcttgatgctgtcgatgcgcagcgggaacggtttggcatccgggtcggccggggtcggttcgctcggtggcagtttgaacaactgcgccaggttcaactggccggatttgtcgaacagcacttcggtcttgggctgatccagttgcacgtcagccaggtgcagggcgcgggtccagaggctgtcgatctgcaggttggcgtagaggcgctcgaaaccgacttgttccttgccgggttcaccgatcttcaggccccacagcgtcacttcaaggctgaacgggttgagttcgatacgctcgatgcgcgccggcgttgtggcgtaattggccaactgctggttggcaatgcgaagagcgatgccgggcaaaatcaggaagcccagcaagctgtacagggctagagcagtcaacaaggcgccgatggcgcgaatcaatcctttgggcatgggtgacgccatctatgtcgaacgagagtgccttggagtatggcacgggttttcggttccgaagaacccggcctttcgagacaagtcttacaactgcaggatcagggtcttcaacggtggttgttggtcctgtgaagggaagtccgcccccggcgtcatgatctgccagtcgcgtacggggcgcccggctttttcggcacaacgcagtacctgatcacgccagtcatccatgctgacttttgccaggttgttgcagcaaataagtacgccattatcggcagtggccagcagcgcgggcttgagcaggctttggtaatcacgcagtaggtcgacggtaccgaatgcgctcttggcccaggccggcgggtcaagcaacaccaggtcatattggcgctgttcaaggcgcggatagcttggcagtttctggccgcgacgctgggtgatcggcaggcctgccagttggcgaatcgccgggaagtagtcggactgcacgaactccatcgtcggcaattgcgggttcagttggccattttcgcgaccgactgccaggttgccttcggcaaaatccaggttacacacttcacgagcccccccggctgctgcgctcaagcccacgccacaggtgtaggcgaacaggttcagcacgcttttaccggcgctgtgctccttgacccaaccacgggtgttgcgcaggtcaagaaacagcagcgggtcttggccggcatggcgcccgcgcactcggtagttgaggccccattcatggccgaccaggtcttccagtgccgcaggctcggcgcggtacaccgtgtcctgccggtcgattcgcgagttgccacgggagcggtcgttgtacaccaacagcaattccaagcccatgaactggttgatcaactcatgcaggtccagcaagtcggcggtttccagcgactggtggaagctctgcaccagcaattgcgggccgtaacggtcgatggtcaggccgccggcgccttcctggctgccatggaacaaacggtagcagtcggtgccttgggcatgcagctcgttgatcaggtcctggcgataatcgagggcggcgcgcagcgcctgattcaagggggacatggagcgcgccttacagggtaaatgggggcgcggagtttaacagctatgggccgctggctacatccgcgcaagccagtgcccccggcccaaaagccgggggcttgctgcaggtcaacggttcaggcgcttgtcgatcaggccgtctaccacgctcgggtcggccagggtcgaagtgtcgccaaggctgtccagttcgttgcaggcgatcttgcgcagaatccgtcgcatgatcttgcccgaacgggttttcggcagggcgggcgcccattggatcagttcgggtttggcgaagctgccgatttccttgctgaccagatccagcaggtgttttttcaacgcatcgctgggctcgacgccattcatgggggtgacaaaagcgtagatgccctggcctttgacgtcatgggggtagccgaccacggctgcttcggccacctgatcatgcagcaccaacgcgctttccacctcggcagtgccgatgcggtggccggacacgttgatgacgtcatcaatgcgcccggtgatccagtagtcgccatcctcatcacgccgcgcgccgtcgccggtgaagtaatagccgggatacggtttgaaataggtgtcgatcatgcgctgcgagtcgccatagacgctgcgaatctgccccggccagctggctttgatcgccagcaccccgctgccggcaccttcgaagactttgccttgctcatcgagcagcacaggctgcacgccaaacatcggctgggtcgcgcagccgggtttgatgcgctgggcgctgaccagcgggctgagcatgatgccgccggtctcggtttgccaccaggtgtcgacaatcgggcagcgctgttcgccgacggcgttgaaataccagtcccaggcttccgggttgatcggctcgccgacgctgccgagcagccgcaggctggcgcgggaggtgttctccaacgggccgtggccctcgcgcatcaaggcacgcagggcagtgggtgcggtgtagaagatattgacctgatgtttatcgatgacctgccagaagcgcgagctgtccgggtagctcggtacgccttcaaacatcagcgacgtcgcgccattggccagcgggccgtagacaatgtagctgtggccggtgacccagcctacgtcggcggtgcaccagaacacttcaccgtcgcggtagtcgagcacgtatttgaacgtcatcgccgcttgcagcaggtaaccaccggtggtgtgcagcacgcccttgggtttgccggtgctgccggaggtgtagaggatgaacagcgggtcttcggcgcccatcggctcgggcgggcagttatcgctggcggcgtccagcgcttgctggtacttgaggtcgcggccttcgctccagttcaccgtggtgccggtgcgttccaccaccagcacggtgctgacgttcgggcaactggccagggccttgtcgacattttgtttcaaagccaccggtttgccgccgcgcacgccttcatcggcggtgatcacggtgcggcagtcggcgtcgagaatacggtcgcgcaaggcgtctggcgaaaagcctccaaacaccaccgaatgcacggcgccaatccgcgtgcaggccagcatggcgtaggccgcttgcggaatcatcggcatataaatgcacacccggtcgcctttttttacgccacggcttttcagcacattggccaggcggctgacgttttggtgaagttggcggtaggtgattttggaagattttgtcggatcatcgccttcccagatgaaggctggctgatcggcgcgttgcgccaagtgacggtcgatgcagttgtaactgacgttcagctgggcaccggcaaaccattgggcggcgcctgtgctgatatctgactgctggacggtgtgccagggttttatccagtcgagaaaatgcctggcctgttcggcccagaaggtgtcaggttgttcgatggattggcgatagaggcgctggtagtcctcttggctgagttgcccggcccggcgcacggcatcggcgatggggaatgtgctgatatcgaacatgagcggtccttattcttgttttggcgacaaggcataaagatgcacgcagtagggggagggttcaaggccaacgtccaaacggacgttggccaaggattacctggatcagccgcggtgacgaccgcggaagtagttgatcaggccttgggtcgaagcgtcctcagccgaggtttcttcggcgccggtcaggcggttgtacacacctttacccagctccttgcccagctccacgccccactggtcgaaggcgttgatgccccagatcacgctctgcacaaacactttgtgttcatacatggcaaccagtgcgcccaggcggcgcgggctgatgcgttcgaccacgatggtgttgctcggacggttgcccgggatcaccttgtgcggcgccagcttctgcacttcggcttccggcaagcccttctcacgcagctcggcttcggcttcgctgcgggtcttgccgagcatcagtgcctggctctgggacaggcagttggcgtacagccactgatggtggtcggagaccgggttgaagctgacgatcggcacaatgaagtcggccgggatcagttgagtcccctggtgcagcagctggtggtaggcgtgctggccgttgcaacccacgccgccccagatcaccgggccggtatcggtggccacaggggtgccgtcctggcgcacgctcttgccgttggattccatgtccagttgttgcaagtgtttggtgatgttacgcaggtagtggtcgtacggcaggatcgcgtggctctgcgcgccccagaagttgccgtaccacacgcccagcaagcccagcagcacgggcatgttctgctcgaacggcgcgttctggaaatgctggtccatggtgtaggcgccggacagcagttccttgaagttggacatgccgatcgccagagcgattggcaagccaatggcggaccacagcgagtaacgaccgccgacccagtcccacatcgggaagatgttttcttcgcgaattccgaaggctaccgctgcggcgttgttgctcgatacggcgataaagtgacggtacagctcggcttccgaacccccttgggcaaggtaccaggcgcgggcggcctgggcgtttttcagggtttcgagggtgttgaaggatttggacgagacgatgaacagcgtggtctcggcgcgcagcttcatggtcagctcgtggaactcgctgccgtcgatgttcgccaggtagtggcagcgtacgcctttgtgggcgtaggacaacagtgcttcggagaccagttccgggccgaggaacgagccaccgatgccgatgttcaccacgtcagtgatcggcttctcggtatagccacgccacaggccgtcgtggatgcggccgaccaggtcagtgatctggttcagcaccttgtgcacgtccggcatgatattcacgccgttgaccgacaacttgtcgcccaccgggcggcgcaaggcggtgtgcagcgcagggcggccttcggaggagttgaccggctcgccggcatacagcgagttgatcgcgtctttaagaccgacttcgttagccaggccgaccagcaagttgcgggtttcgctggtgatcaggtttttagagtaatcgaggaaaagcccgcagctgctcagggtaaattgggaaaagcgctggggatcggcattgaacgcttcgcgcatgctgaaatcctgcatggcttggcgatgttgattgagcgcttgccaggcgggcagagcggtaacgtcatgaggagtgcggtagtacgccatcgctgcgggtttcctttttattacggggactgcctttaggacacttcaaagtccggaacgtccagtctttcagcaaggttgggttccagacagcgctaaccaagagcgcagggcgattacattaaacctagcgtgtcgatatgtcttggctttgtctgcgctgtagccggtacttttttataccggtacagcaggcagggcaacaggcgcgctgttttaaagcagcaaaaggcgggaatggtcaggccaggttcaggtgcaggtgcaggttatcgatcaaacgggttgcgcccaggtaggccgccaccaggatcaccacatcacggtcttccggtgtggcagggcgcaggtgcacgccttggcgcacttccaggtagtccaggcgcaagccggcggcttcgatctggcggatgtgctcggcacgcaacctggcgaaatcgtggtcaccgcctttgaccgcgtcggctatctggctgaggctgcggtacagcacgggggcgatggcgcgctgttcctcggtgaggtaaccgttgcgcgacgacaatgccaagccgtcttcagcacgcacggttggctcaccgatgatctggatcggcatgttcaggtcatggaccatggcgcgaatcactgccagttgctggtagtccttctggccaaacacggccatgtccggctggaccatgttgaacaacttgctcactaccgtggccacgccctcgaagtgcccggggcggctggcgccgcacaggccttcggacagctgtggaacgctgacgcgggtctggccggtcatgccgccggggtacatttcctcgacagtgggtgcaaacagcaggttgcagccggcttgcaggagtttctcctgatcggcggccagggtgcgcgggtacttgtccaggtcttcacccgcgccgaattgcagcgggttgacgaagatgctcgccactacaaagtccgcctgttgggcggccttggtcaccagcgtggcgtggccgctgtgcaggttgcccatggtgggcacgaaaccaatgcgtttgccggcgctgcgggcgtgggtgacggcagcgcgcagttctcggacggttttaacggtgttcatgcggagaatccgtgttcggcgccagggaaagtaacggctttgacttccgtgacgtacgcgctcagtgcagcctggatgctgtcctggccttccatgaagttcttcacgaacttgggcgcgcggccggtcagagaaaggccgagcatgtcgtgcaccaccagcacttggccgtcggtgtcagagccagcaccaatgccgatcacgggcaccttgaccgcctgggtgatctcggctgccagttcgctcggcacgcactccagcacaatcatcgcggcaccggcctgttccagggcgatggcatcggcacgcatctggcgcgcctgggcttcgttgcggccttgaaccttatagccgccgaggatgttcaccgactgcggcgtcaggcccatgtgcacgcacaccggcacaccgcgctcggccagcaggcgaatcgactcggccagccacacggcgccttcgatcttgaccatatgcgcaccggcttgcatcagcttgcccgcgttctggaaggtttgctcgacggtggcgtaacccatgaacggcaggtcggcaatgatgaaggcgccatcgttgccgcgcttgacgctggcggtgtggtaagcgagttcatccgtggttacaggcagggtgctgtcattcccttgaagaaccatgcccagggagtcgcctaccagcaacacttcgacaccggcctggcaactggcgtgggcgaaagtggcgtcgtagcaggtcagcatggtgattttttcacctttgagcttgaggctctgcaaggtggtcagggtaatgtctggcatgaaaagggtcctcagtcaggcgcttggaaacagcgagtaacgcgcgtgagtcttcgtttatacaggcgcactgtcttgagagcagtgcttataaggcctggattgcgccctttagcgccgggttggcggcagcgggacgcctatagtcgtgatgaggacgagggaagtcaattggatgtgttaccgcattgttacgagtggggtgttaccgctgttactgatgcgattcagccggattgatcggctattcaagacaggagtgatcacctgtgggagctggcttgcctgcgatgccggcggctcggtccaccaggcaaaccgaggtgatgctatcgcaggcaagccagctcccacattgaccgcgtcagtcttggggcaggcgttccaggccgacaaacgggcaggcggccaacagcgcgctgagtggtttgccgtcgggcagtgacaggtcggcgggtgcgagctcagccagcggatacaacacgaaagcccgcaggtgcatctgataatgcggcaccttcaggcgcggttcgtcgatcaggcgatcgccaaacagcaggatatccaggtcgagcgtgcgcgggccccagcgctcaaggcgctcgcggccctggtcgttctcgatggcttgcagggcatcgagcaactccaaaggcgcgaggttgctttccaaagccgccacggcgttggtgtagcgtggctggcccggtagcaaagagtcactttggtaaaacgccgacacgccggcaagcgaggtgcccggcaactgcgccaacgctgcgatggcgtcgcgcaattgctggtccggggcagccaggttgctgcccattccgatgtagatgcgttccacgtttattcgcccgcagcgcccgaggcatcggcgctgcgcttacgcttgctgccggagctgcggcgacgctttttcgggccctcgccggcaccatcgcctttgctgccgaggtcacggatcatgtcgcggcgctggctgtcattggcgtcctgatagtcggtccaccagtcgcccaagccgtcggtctgctcgccagcgctttcgcgcagcagcaggaagtcgtagccggcacggaaacgcgggttgtcgagtaacaggtcggcgcgtttgccgctgcggcgcggcaggcgttcctgcatgtcccagatctcgcggatcggcatcgtgaaacgtttcggaatggcgatgcgctggcactgttcggcgatcagctcgtgcgcggcttcctgcatggccggaatcggcggcatgccacggtcttgcaggcgcagtacgcgtttgggcagagccggccacagcagggcggcaaacaggaacgccggggtcaccggtttgttctgtttgatgcgcaggtcagtgttgatcaacgcttcgctgatcagggtgtgggtgtacgtcgggttgtattcaagtgcctcggcgctggccgggaacagtgggtcgaacagctgcagatcgacgagcatctcgaatgtgtcagcggcgtaacccgagaggaacagcttgagcacttcttcgaacaggcgtgccgacgggatttcgcgcagcatcggtgccagctcgcgaatgggcgcggcagtgtgtttctcgatgccgaagttcagcttggcggcaaaccgcaccgcgcgcagcatgcgcaccgggtcttcctggtagcgctgcgtcgggtcaccgatcaggcggatcaggttgttgcgaatgtcgtgtacgccattggcgtaatcgaggatacgctcgctgaccgggtcgtaatacagggcgttgatggtgaagtcgcggcgttgcgcgtcttcttccagcgtgccgtaaacgttgtcgcgcaggatacggccgctctcgttgcgggaagactgattggtgtcttcctcttcatcgttttgcgggtgacctgcgcggaaggtcgcgacttcaatgatttcgcgaccaaagtggatatgcaccagcttgaagcggcggccgatgatccgcgcgttgcggaattcggcgcgcacttgttcaggcgtggcgctggtggcgacgtcgaaatccttcggcgtgatattgagcaacatgtcacgtacacacccgcccaccagataagcctggtagccggcgttctgcaaacgttcgacgatgttcaccgcataacggctgaattgagcgcgctgcaatgaatgctgattgctgttaagcacttcaggcgtgctgcgaatgtgttgcgtacgacgcaagggagaacggaatgactggaacaacttcttcagcatgggatgcactgtttgaaggaatgttcggccataacgaagaatgaccgcatgatgggcggggattctagcatttagtcgggggatggtgtaggaacaagctgcaggccttgcgccataagccttaaatcgagaattgccgtggccaaacggcggaaactacaaggggagccgaagctcccccagaagtagttgcgtgctctatttttattatggtttcgggcttcttgtttttgttgatcgccctcgccatgaagcttcaccttcatggcactcccaatcgagagtcaagagcaaacggattgctttggtcgctgtgttgctgatctacgatccaaccagttcaggctctgccttagggcagtttttgttgttctcggcctggttgcggggcaagccccaaatgcaacgcctctccaaaagaatcagttagctgcgcctccgccgtgttgtttttgttatgcgtgagtcgattcgtcttatttttattgtctggtacaaagcttgttattgtttttgtactaagcatatagcagggtgcgtgccaacttttgtaccgcccagcaaaagcagggggttggagggtttttggctttcctgaacgcgaaaaaaagccggggcttcgttaccgtaagccccggcttttgttacgtgaaaattcagcggtaacagttttttcacatctgagggtgttacctgtgggggcgcaccctcaactctcgctggccactccggtcttgcgtcgcggaatgcccaggcgctggcgccgttcccacaagcatttacggcttacgcccagcttgcgcgccagttcggtctcggtcatatggtcctgatgttccaggacgaaatgctggaagtagtcttccagtgacaaatcttccgtcggctcatggctggtattgctgccgccaccctgttgtggggccagcccgatgaaatcgtcgtcttccagatcgctcagttcgatatcgatacccagcaactcagcggagatttccgggctttccgacagaatcaccgctcgctcaacggcgttctccagctcccgcacgttacccggccatgagtagtgtcgaatcgcctgctcggcgtccggggcaaatttcaggtcggtgcggttgatacgcgcgctctggcgcagcaggaacgcgctggcgatctcgttcacgtcggcgccacgctcgcgcagggccggcaacttgagggcgatcacgtgcaagcggtaatacaagtcttcacggaattggccgattttggccaggctcttgaggtcccggtgggtggccgcgatcaggcgtacgtcgaccttctgcgactgcacggagccgacacggcgaatctcgccttcctgaagcacgcgcagcaaacgcgcctgggcttccaggggcaattcgccgatttcgtcgaggaacaaggtgccgccgtccgccgcttccaccaggcccgcacgcccggcgctggcgccggtaaacgcgcctttttcgtggccaaacagctcggactcgatcagggattcagggatggcggcgcagttcaccgaaatcatcggcgccttggcgcgtttggacaggttgtgcagggcgcgggccaccagttccttaccggtgcctgattcaccctggatcaatacattggagtcagttggcgcgactttgcggatcttgctgtacaggtcctgcatcggtgggcaggagccgatgatgccgatctcgccattgctgttgtcgacacccggcttgtcggcggccttgccggcagggcgttgctcggcaggcgtactcccagccgactgacggtcacgcaggatacgggccacggcctgaagcatttcgtcgtggtcgaaaggcttggcgatgtagtccaccgcgcccatcttcatcgagtccaccgccgaacgcaggctggcgtagctggtcatgatcagcaccggggtgccctggccaagcttgatcagctcggtgcccggcgcgcccggcaggcgcaggtcgctgacaatcaggtcgaacgtgggaatgctgaaacgctcctgggcttcctgcaccgagccggcttcgctgacctggtactgattacgttcaagcaggcgacgcaaggcagagcggataatggtttcgtcttcgacgatcaaaatgtgcggcattgattcaattctctcgacggtctcagttcacagcggacgtcgcttcgacatgacgcggcaaggtcacccggatacgggtgccgcgttggctttcaaggtcagccgggctgtcgatggtgatttgtccataatgctcttcaacgatggaatagaccagtgcaaggcccagaccggtaccttcacccggatccttggtggtgaagaaaggttcgaacaatcggtccatgatgttctgtggaataccactgccttcgtcttcgacgatcagatcgaccgtgtgctcgaaagcctcgctcttgacgcgtaccgcactgccggccggtgtcgcgtcacgggcgtttgacagcaggttgatcagcacctgcgccaagcgttgggagtcgccgtcaacccaatggtcggggtcgcacaggttgaaaaactgtacttcgaaattgcgccggttcaaggccagcagcccaatggcatcctgcgccacttcggccaggcacacggcttcgtcctgattctgatgggcgcccgcgtgggcaaagctcatcagcgactgcacgatgcgcgaaacgcgcttggtctgctcaagaatctgcccgctgatctcggtgatttcgtcgtcttcttcgcgctcttcgcgcaggttttgcgccaggcacgcgataccggtgatcggattgccgatttcatgggctacaccagctgccaggcggccaatgctggccaggcgctcggagtgcaccagcttgtcttcgagcatttgggtttcggtgaggtcttccaccagcaacaccaggccgctgttaccgggcgccaggggctcgtcgatggcggctttgtgcaagttaagccaacgggtctgaccatcaagcgccagatgttgtttgtgcaggtgttcgtcgggcaggttgatgaagccttgcagcagttctttccacggctcgcccaaggtattcaagcgtgagcccaccacacgctgcgcggcgatgccggtgagttcttccatcgccttgttccacatcaggatctcttgatccttggccagggaacacacgcccatcggcagttcctgcaaggtttggcgatggtagcggcgcagggcatcgagttcggcggcgaggccggtgaggcgcgagtggtaatcctccagccggctctcgatgaagtgaatgtcttcagtcacatagttttcaccgccggccttgtaaggcaagaaggtttccaccatgtcctgggaaacgctcgggcccatcaggccggacaggttggcttcgatacggtcgcgcaagcggcgcagcgcgtaggggcggcgctcgtcgaatggcaggtaaagatcgcgcagtgcttgttcgacttccttttgcgccgctttcgcacccaggggcttggccagttgtgtggcgaactcctgaggcgacgccgcgtgcagctcgcggcgttgcgggcggcgtacgttgtccacggcgcaggcttcagcggcgctggtctcctcagggctggcgttggtgaacagcgagatcagggtgaacatcagtacgttggccgccagggatgcgatcgccgccatgtgccagctggtgtcgtccagcacgtaaatcatgttgagcaacgggatgtagaagccctgcaggttgccgaccaacggcagcagcatggtgacgatccataccaggattcccgccagcaacccggcgataaagccacggcgattggccgtcggccagtacagcaccgacaacacgcccggcaggaactgcaaggtggcgacaaatgcgacgatgccgaggttggccaggtcttgcccggcgcccagcaacagatagaagccgtagcctgccatgatgatcgcgacgatcagtgctcggcgcgtccatttcagccagcggtagatattgccctcagccggtggttggtacagcggcagcaccaggtggttgagtgccatgcctgacagggccagggtggtcacaatgatcaacccgctcgccgctgacaaaccgcccacgtaggcgagcatcgccagtgccgggctattcgccgcaataccgatgccgagggtgaagtattcggggttggtggtagcaccgagtttcaagcctgcccacaggatcagtggcaccgccaggctcatcaacagcaggaacagtggcaagccccagctggcgctgaccagtgaacgcgggttgaggttctcggtgaaggtcatgtggtacatgtgcggcatcacgatcgccgaggcgaagaacaccagcagcaacgtgcgccacgggccttcttgcagcggcgtgtgcaaggcggcgagggctgtctggttttgcagcagccacagttccagctgttgcgggccgtcgaatacaccatagagcgcatacaagccgacgccgccaatggcgatcagtttgatcaccgactcaaaggcaatcgcaaacaccaggccttcgtgtttttcgcgggtggcgatatggcgtgagccgaagaaaatcgtgaacagcgtgatcagtgcgcagaaggccagggctacgcgatgttgcacgggctcgcgggtcaggatgctgatggagtcggccacggcctgaatctgcaaggccagcaacggcagcacgccgatcagcatgaaaatggtggtcagcgcgccggcccaggtgctgcgaaagcgaaaggcaaacaagtccgccagcgacgacaactgataggtgcgggtgattttcaggatcgggtagagcagcaccggcgcgagcaggaatgcgccggaaacaccgaggtagctggagagaaaaccatagccgtactggtaggccaggcccacggttccgtaaaacgcccacgcactggcataaacgcccagggacaaggtgtaggtcaacggatggcgaatgatcgcccgcggaatcattccgcgctcactgatccaggcgacgccgaacaacgccgccaggtaggcggcgctgatcagcagcatctgggtgaggctaaagctcatcggcatctttttggctctgcaggatgaaggtcacgacgatcaatatcagccacagcagatacgggcggtaccaggcgcccgtggcgtcgatccaccaatccatgatggcaggggaaaacaggtagatcccgacgaccagcagcaggaccaatcgatagatgtacatgttggcctctgtgtaaaaacgtgcggcgatggtaacggatggtggccaagctgcaagcgccttcagctcaattgcgcttcggccagcgtgagtgtgcgcgggatcttgccggcatcccagtgcaggatgccccaatccagcagttcccgtgggctggcgtgcagcaattcatcaccgggttgctggccgagggcgcgcaatgccctgaccagcaaaggcgtggcttggtccggtgtcaacggcggggagcggtaggacttgcccagcttgttgccgtccggctggatgatcagcggtacatgcaggtagcgcggttggcgcaggcccaaaagttcctgcaaatacagctggcgcggggtggagtcgagaaggtcggcgccgcgtacgatgtcggtgacgccttgccaggcatcgtcgagcaccaccgcgagttgataggcatacaggccgtcgcggcgacggatgatgaagtcgcctgattcgcggcccaggtgttgtctgaactcaccttgtacgcggtcggtgaagtggtactccagctccgggacacgcaaacgaatggcggcatcctgctggtcgtgaccggcattgcggcacagcccggggtaaatcccgttgtaggcttccagttgtttgcgcgagcaggtacaggcgtaggccaggccgtggttgaacaggtcgttcagcactttggcgtaggcttcatgccgttcgctttgtcggaccagttcgccgtcccactcaaaaccatagctttccagtgcgtgcagaatcgccgcttgggcgccgggttcttcacggggtgggtcgaggtcttccatgcgcatcaaccagcggccgtgattggcgcgggcgtcaaggtaggaggcgagggcggcaaccagcgaaccgaaatgcaaatggccgctgggcgtaggggcgaaacgccctatataggtagaagctgtcatgggccggatactactggaaaaacggcaaacgccagaaacaaaaatggggcgttttcacgccccattcgttcagttcggtagagattacttaccgacctgtttttccttgatttcagccaaggtcttgcagtctacgcagaggtccgcagtggggcgggcttccaggcgacggataccgatctcgacgccgcaggattcgcaccagccgtattcttcgtcttcgatcagttgcagcgttttgtcgattttcttgatgagcttgcgttcacgatcacgggcgcgcagttcgagggcgaattcctcttcctggctggcacggtctgccgggtccgggaagttggcggcttcgtccttcatgtggtcaaccgtacggtcgacttcctgcatcaagtcctgcttccacttttgcaggatcttggtgaagtgctggcgcatgggcttgcccatgtactcctcacccttcgcttcgacgtaaggtgtgaagccactgaggctctgctgctgttgctttgcttgggtggacatgaatagaccgcctctcactcttctaatccattgcgcaggattgcaacgtcaccgacacctgccggccctgcggctgcaagcgggcgaacttaccagatagattcggggtgcgccactcccggttgtcgaggggccatcatgccggggttgcaaactgcaatagcccgccatggctggacatgtaacgcctcgaatgttgattttagtcgttttgcgcgcgcttgcccgggccgcctgagtggccgggcaggcaatagaacatgttttaccgcgcgggttcggtagaatcctgattttgtcctcacggttaaggaaggctaatggctcagccctacagtgcgcgcagtcgcgccatcgaaccttttcatgtcatggcgttgctggcgcgggccaatgagctgcaagcagccggccatgacgtgatccacctggaaatcggcgagccggatttcaccacggccgagccgatcattcaggccggccaggcggcgctggccaacggcaagacccgctacaccgccgctcgcggcttgccggagttgcgcgaggccatcagcggcttctacgggcagcgctacggcctgagcgtggaccctgaacgcattctgatcacccccggcggctccggcgccttgttgctcgccagcagcctgctggttgatccgggcaagcattggttgttggccgatcccggttatccgtgcaatcgccacttcctgcggctggtggaaggcgcggcgcaactggtgccggtcggcccggacgtgcgttaccaattgaccgctgatctggtggccaaacactggaaccaggacagcgtgggcgcgctggtcgcgtcgccggcgaaccctaccggcacgatcctcactcgggatgaattggctgggttgtcgagcgctatcaaagcgcgtgacggccatctggtggtcgacgagatctatcatggcctcacctacggcaccgatgcggccagcgtgctggaagtcgacgacgatgcctttgtcttaaatagtttttcgaagtatttcggcatgactggctggcgcctcggttggttggtggcaccagccgctgccgtgggcgaattggagaagctggcgcaaaacctctacatcagtgcgccgagcatggcgcaacacgcggcattggcctgttttacctcgcaaaccctgagcatcctggaagaacgtcgcgcggaattcgggcgccgtcgcgatttcctgttgccagctctgcgcgagctgggcttcggcatcgccgtcgagccggaaggcgcattctatttgtatgccgatatcagcgcgtttggcggtgatgccttcgcgttctgccgccacttccttgaaaccgaacatgtagccttcacgcccgggctggatttcgggcgctttcaggcgggccaccatgtgcgctttgcctacacgcaaaacctcgaccggctgcaggaagcggtggaacgcattgcccgtggcctgcagagctggcaagcctgatgcgctttcatcctcccctcgaagaagcgcggctgattcgacgctacaagcgttttctcaccgacatcgaaaccgttagcggcgagttgctgaccattcactgcccgaacaccggctcgatgctcaattgtatggttgaaggcgggcaggtctggttcagccgttccgatgacccgaagcgcaagctgcccggcacctgggaaattgccgaaacgccgcaaggtcggcgggcgtgcgtcaacacagcgcgcgcaaatcaactggtcgaggaagcgttgcgtgccggggtaatcaccgaactcaacggttttacggcgttgaagcgtgaggtgccttacggtctggaaaaaagccgcatcgattttcggctggattacccgcagagcgctgcgtatgtggaggtcaagagcgtcactttgggcttcgatggctcgacggtggcggcgtttcccgacgcggtcacccagcgtggcgccaaacatttgcgcgagctggcgcatttggcgcgtgaaggtgtgcgggcggtgcagctgtattgcgtgaacctttcaggcatcgatgccgtgcgcccggcggtggaaatcgaccccggctatgccgccgccttgcatgaagccaaagccgccggtgtggaggtgctggcctacggtgtgcacgtcacgccagaggagatttttatcgaccgccgcctggacgtattgatgagcgactagagttccacccacaggccctgttggtcttcgcggcttggcagggcggtgaggtgttggcctgcgcacgggccggcgatgcattcgccgctttcgatcaggaacagcgcgccgtgggtggcgcactggatcaggctggcgctggcatcgagaaaccggtcgggctgccattccagcgtaatgccgcgatgggggcagcggttgatataaacgtaagccacgccacctcggcgcacggccaacagcttacagccgtcgatctcgaaaccgcggctgctgtctggtgcgagactgtctgaggggcagagaaacttcatttcaatccttaagtgccttgacgttcaaatgcaaacaattatcaaatgcccgcttcgcccatagctgaccgggcgctcagtacgatgccagacaggtcccgtctgtcacatcggtgagtgcctgcgcggccctgcccttggaaggaaaccctgttatgcgcctgagtaccagcgctattgcgcttgttgcctcactgctggtcaaccacggggcccaggcctccgaactgccacaacgctgggtcagtgccggcggggcgctatcggaatgggtcgcggcgctgggtgccgagtcgaagttggtgggggtcgataccaccagccagcatccggaatcactcaaggcgttgccgagcattggttatcaacggcagttgtcggctgaaggcatcctgagtttgcgcccacaggtgctgatcgggaccgaagaaatgggcccgccgcccatactttcgcaaattcgtggcgcgggcgttcaggtggaaatgttttcggcccagccggatttgccgaccttgaaagtcaaccttcagcacctgggtaaattgctcggtaatgaagccagagcccatgaattgtttaccggatatgaacaggcgctggaccagcagaaaagctgggtcgccaaggcccaggccacgcagaaagcgccgggcgtgctgctgttgctgggccacgcgggcggcaagccgctgattgcgggtaaagacaccgctgccgattggctgttgcagcaggcgggcggacataacttggcgacccacactggttacaaaccgttttcggtggagtcgctggcggggttgagccctgatgtattggtatttgccgatcgcgcattgactggcgatgcggcgcgcgcggccctgttcaaggaaaacccgattctggcgtcaacgccggctgcaaagaacggtcgagtgtatgagctggacccgaccttgctggtcggtgggcttgggccacgattgccgcaaagcctggcgacgctggctgccgggttttacccgtcccaggctaaacctgccccatgaccactttggttaagccaagaatgttgtttatcgggctggcgctgctgtgtgcgctggcgatctggctgtcgttggcgctggggccggtcagcttgccattgctggatacacttaaagcggctttgcgcttgatcggcgtgccgatagaggcccaggggctggagcaggccgagttgatcctggggcagattcgcctgccgcgcactttgctggggctggcggtgggcggtgtgctggccttgtcaggtgtggcgatgcagggtttgtttcgcaacccgctggccgacccggggttggtcggggtgtccagcggtgcggcgttgggggcggccatcgccatcgtcggaggttcctttttcggcggtctgccggaggtgttcgggccatatttgttgtcgctgtgtgcatttctcggcgggttgggcgtcaccgcgttggtttatcggctcgggcgtcgcaacggccagaccaacgtcgcgacgatgttgctcgccggtatcgccctcaccgcccttgccagctcggcggtggggttgtttacctatctagcggatgacgccacgttacgcacactgaccttctggaatctgggcagcctcaacggcgccagttattcgcggttgtggccattgctgctggtgagcgccggggtggcgctgtggttgccgcgccgagccaaggcactgaatgcgttgttgctcggtgagtctgaagccaatcacttgggcgtcgacgttgaaggcctcaagcgtgaactggtgttctgcaccgccctgggtgtgggcgcggcggtggcagcggcggggatgatcgggtttgtcgggctggtggtgccgcatttggtgcggctgctggccgggccggaccaccgcgtgctgttgccggcgtctgtgctggccggggccagcctgttgttgttcgccgatttggtcgcgcggctggcgttggcgccggcggagttgccgattggcatcgtgaccgcgtttattggcgcgccattttttctctatctgttgttgcgggggcgtgcctgatgctgcgtgtggaagagctgcagatccggcgcggccgcaaagttgtattggcagatgtcactcttgaactggtgccgggggaagtgttgggagtgctcgggcccaatggcgcgggtaaaagcactctgctgggggctttgtgcggtgaactgcaaccggatcaaggtaatgtgtggctggatcagcaggagctgaaggactggagtggtgtgcagcgtgctcagcggctggcggtattgccgcaggcatccacgctggatttcgcctttcgcgtcgaggaagtggtcggcatggggcgcttgcctcatcaaacggggcgggtgcgtgatgaagaaatcatcgaggcggctttgcaggcggcggacgtcgggcacttaagtggccgcagctacctggcgctctccggcggtgaacgccagcgtgtgcacctggcgcgggtgttggcgcagctgtggccgggcgaagctgggcagacgctgttgctggatgagccgacctcgatgctcgaccctttgcatcaacacaccactttgcaagctatccgtagttttgccgatcgcggggcggcggtgttggtgatacttcatgacttgaacctggccgcgcgttattgcgatcgcatcctgctgctggaagatgggcgcccgcatgccttggacacgccgcaagaggtgctgaggccggagccgctgaaggcggtgtttggcctggatgtgttggtgcagccgcatccggagcgtgggcacccgttgatcattgcgcgctgaaatccacttttcccaaggcaaaaaaagacccggcaagagccgggtcaaataaccgtgattagcctgatgaggagataatctgagagtccgaaccaatggtctttcagttatcggctgatctcgcgaccagttgtgataatcataacgattctcatttgagagtcaacctttgttttgcgtcgctagcgagttttgttcagcgcctgtttgcagtgcccgtaaacaatgggccttgctgccgatctaatttttctgacgcgtcgagatcgcatccaactgacggttcaaagcctccttgcgctccgtcgggatgtcgttccagtgcacgtccatcaatgcgccttcaattgcatacagcagtactttcgatgcgcgaaacccgcgagtgcgcacggcgcggtaggcatcaactgctcccaagcggcgtaagtcggaagcgctgtggatgcccaccgcgtgcagccactgtgccgacgtcttgcccaggtttttcaggtgttgcagctcatcgttcatcaagcctccttgcgacggccgaatggtgcggtgggtatcgtgaccaggcaagcctgaaaaagagtgtagcgctcagtaggaaaagcgtggttctttggtcagcaatggctgaaaagcttataagagtgcgttgggagagcgttggcgataagcaggcgagaaacgcccggcccgcagggtggggaccggggtttgggttgaggtgttacttggtgcggtagcgcaggcgagtaccgaaattgaccgacatgaggatttcgtcggcggtcaggtccggggaaaagtaggtgccggagatctgtgcatgggccaggctcgcgccttccagcgaacagtcgcgcaaatccaggccgcgcaagtcggcggagcggaagtaggcgtcggtgaaatctatgccggtggcgttcaggtcacgcaggtccagccctcgaaagtcgccgccacgcatgtcaatggcgccgtctttggggcgctcctggttgaagccgcgaatgtcgtctttatgcaggagcgcgtagagaggggtatcgagaagcttgggctgactcatgatggcgactcccgttggaattatgacgccattatagtgccactattgctcggccgtgcaccgaagaacggtgacacgaccaagaaatatttcttacaggccgggcaggcgctggcggatgtgcgccacgagcgcgtcaagtgtgccgctttcgttggtctccacacgcttgctcagcagcagttcttcggcagacaacgggttgcggttcgcttgctgctcttcgattacggccagtgttgcgtcggacggatcgtttttatctgcctgacgttgcgccagccaactgctgataacggcttgcggtgcattgcaatccagaatcaggaacggcgcgcctgtggcttcggcaatcctggcggcggcgtcacgttgctcacgtttcaggaaggtggcgtccagtactaccgggtaaccggcacgtaaaacggtatcggctatttcgttcaggcgagcgtaggtggctgcactggcgtcggccgcataaatgccgacttgtggcgtgttctcgaccttttgctcgccgaacaggcgcttgcgctcgacgtccgagcgcaagcgcaccgcaccgagtgcttctaccaggcgcattgcgacgtggcttttgccgacggccgaaaccccgtgggtaatcgccaggaagcgtgaaggaatggtgctgtagctctccgccaggttggcgtagttgcggtactggcgcagggtggtggcgcgttgtaccgggtcggcttcgctcggcatgctgaacagcgccaccttggcgcgcaccagggcgcggtaggctttgtagaagttcagtacttcaaggccttggtagtcaccggtcagttccaggtactggctgataaagcggcgtgccagggatttgaggccacggtcttccaggtccatcgccaggaagccggtgtcggcgtacacgtcggtgaagcggaagggctcattgaattcgatgcagtcgaaaatcaccacgttgccgtcgatcagggtggcgttgcccaggtggatgtcgccgtggcactcacgggtgaaaccttcgagtttgcgctgttggaacagcggcttgaggcgctcgaagctgctttcagcccaggcttgcaacgcttcgagttgcaccaggtcagccttgtcgctgaggaaggggcggatctgttcgaagttttgacgaaccggtgccatcacttcatttggcgtaccggccgggtgttctagtggcactttaggcgccgtaaggtggaaatgcgcaatctgccgggccatctcatcgatatgcgcgctggtcaattcgccgttggcttgcaaggtgctgagcatctggctttgcgggaattggcgcattttcagtgcgtactcgatcaccgggccgtcgccgcccaattgcggggcttcggctgtgccggtgatcggcaacacttcaagatacaaatcttcggtgaggcgggcgttgagacgcagctcttcccggcagaagtggccacggtcttccagggccgtgaaatcgagaaagccgaagttcatcggcttcttcagtttataagcatagggaccggtcagaatgacccaggaaatatgggtttcgatgacttggaacgcttcaaccgggtgagggtataaagccgggttttgcagggcagcgatcagggactggctcacgggcgatccttcaaagtctgggggaaaacatggcgggcattatggccgctacgagcggtcgtgcaaaccgctgtccggctcatgttgatcatcaataaagtgcgtataatccgccgccatgactcgaacccgatctccccgttcccgtaaaaaacctccttcccgtggcctgcgcccgtggctgggctgggcgctcaagctcagcctcgtgggccttgtggtgctcgccggctttgcggtgtacctcgacgctgtggtccaggagaagttctccggcaagcgctggaccatcccggccaaggtgtacgcccgcccgctggaactgttcaacggccagaagctgagcaaggatgacttcctcaccgaactcgacgctctgggctatcgccgcgagcctgtgagtaacggcccgggagcggcagctgtcagtggcaataccgtcgacctgaatacccgtggcttccagttctatgaaggcctggaaaaagcccaaccggtgcgcgtgcgtttctccggcgattacgtcgccgagttgtcgtcgctcaatggcgccaaattgccggttgtgcgtctggaaccgctgctgatcggcggcatttacccgaaaaacctcgaagatcggatcctgatcaagcttgatcaagtgccaccgtatctgctcgaaaccctggtggccgtagaagatcgcgatttctacagccactggggtgtctcgcccaaatccattgctcgcgcgatctgggtcaacacctccggcgggaaaatgacccaaggcggcagtacgctgacgcaacaactggtcaagaacttctacctgaccaacgagcgcagcctgacccgcaagctcaccgaagccatgatggccatgctgctggagttgcattacagcaagcaggaaatccttgaggcgtacctcaacgaggtgttcgttggccaggatggccagcgcgcagtgcacggttttggcttggccagtcagttcttcttcgggcaaccgttgtccgagttgaaactgcaccaggtcgccttgctggtgggcatggtcaagggcccgtcctactacaacccacgccgcaaccctgaacgtgcgttggagcgccgcaacctggtgctcgatgtgctggagcagcagggcgtcgctaccgctgagcaagtggccgccgcaaagaaaatgccgctgggtgtgaccacgcgcggcaaactggccgacagctccttcccgggctttatcgacctggtcaagcgtcaactgcgtgaagactaccgcgatgaagacttgaccgaagagggcctgcgaatcttcaccagtttcgaccctattctgcagatgaaggccgaggcttccgtcaacgacaccttcaaacgcctgacgggccgcaagggggccgacgaggtcgaagcagcgatggtcgtgactaatccggaaaccggtgaagtccaggccatgatcggcagccgccaggccagtttcgccgggttcaaccgcgcactcgatgcggtgcggccgattgggtcgctggtcaagccggcggtgtatctcacggcactggaaaaaccgagcaaatacaccctgaccagttggctctcggacgagccgctgtcggtcaagctggctgacggccaggtgtggacgccgaagaactttgaacgtcgttccaacggtacgattttcctgtaccagggcctggcgcattcctacaacatttccacctcgcgtctcgggctggaagtgggcgtgccgaacgtgttgaaaaccctgggtcgcctgggcatcaatcgtgagttcccggctttcccgtcgatgctgctgggcgctggcgccatgacgccaatggaagtgaccacgatgtaccagaccatcgccaacggtggcttcaatacgccgatgcgcggcattcgcagcgtgctgaccgccgagggtgagccactcaagcgttatccgttccagattcagcagcgcttcgatgcgggctccatctacctgatccagaacgccatgcagcgcgtgatgcgtgaaggcaccgggcgttcggtctacaacgtgctgccggcgaacctcacgctggcgggcaagaccggcaccagtaacgactcacgggacagctggttcgcaggtttcggccaggacgtattggcggtggtgtggctggggcgggatgacaacggcaaaacaccgttcaccggcgctaccggcgcgttgcaggtgtggacaagtttcatgcgcaaagccgacccgctgccgcttaatatgccgcagccggataacatcgtgcaggcgtggattgatccgcacaccgggcagggctctgatgccaactgcccgggcgcggtacagatgccgtatattcgcggcagcgagccgcctgccgggcccgcctgcggtggcggtgcccctgccagtgcggaatcggtgatggattgggtcaagggctggatgaattaagcaaagagggtttcaagtgaacaagtggtggattccagctattacagctctggctttgctcaacggttgcgccagcgtgcagcgcggctcgattccggtggtggactcgagcactaacgtttccaataacgaccgtatctcggccacgggcggcttccgccagaccgtggtcaagcgcccagcccaggctgcgcctcagtcgattccgcaggattcgggtgtagtggtgatggtgccgggtggtggtgcggcaacgtcggcaccgatcagtgccgagccgtggaccccaggcccaagcacttcgggcccggttgactccacgccaattcagacggcgccgatcaatcagggctcttacagcatgccatcgacgccgagcggtattccgtcgtcgtccagctccggcggcttgtcggctgacgagcagctggatggtccggtactggccctgttgactaccgctcagcagcaacaggccggcggtgacctgaacggcgcatcctcgagccttgaacgtgcccagcgcgtggcgcctcgtgagccacaagtgctgtatcgtctggcccaggtacgcatggctcagggtgatgctccgcaagccgagcagttcgcccgtcgcggcctgaccctggccaacggtcgcccggacctgcaagccaacctgtgggccctgattggcgatgcgcgtgccgcacagggcgatgccgccggcgccgctcaggctcggcaaaaaggcaaggttacttactgatggatgcgcgttttcctgcgattgccgaacagttattgatgatcgagcgtgaactgcgcgtacagggctggtgggacgaagtgtcccccagcgctgaagcactcagcagtgtggagcctttttcagtcgacacgctggacttccaccagtggctgcaatggatcttcctggcgcgcatgaagcagattctcgaacaggacctgccattgcctaatgcgtccgggatcatggagatggccgagatggtctacgcggatcgcccgcaagagagccttggtttacgtaacgcgctgaaaaagttcgaccaattgatcgtcgacgctcgttaattgcctgactgccgggttttccggcagccttgcgcacatttctaccgcttcacgacattcaggcgagttttatccctcctcaaagccctttcttctacgttctcatgcgcttagttggaaaaaagcgcaattattgcttgacttgaacggcctgaaacagaagaatccaaagtccgctgtatcgggactgccagaagcaggcccgctcagcagatcatgaggcgcacatccgcgccgacctgtaacacccgcaacgcgttacctcgcgctgggtgggaaaagcccgcaacacttgggacgatcccaatacttgctcagtcagtgctgacgtagtcggcgaccaccgtcgctcatgctctgttgagaagtaaacctattaagacccgtcggttttcaacggacggtattctggcgttttagaggtgaacaacgtggagcttttatctggcggtgagatgctcgtccgctttttgcgtgacgaaggcgtcgactatatctacgggtacccaggtggtgctctgctgcatgtttacgacgcactgttcaaggaaccggctgttacccacatcctggttcgccacgaacaggccgcgacccatatggctgacggttacgcccgtgccaccggtaaagccggtgtggtactggtaacgtccggcccaggcgcaacgaatgccattaccggcatcgcgactgcgtatatggactccatcccgatggtgatcatttccggccaggtcccaagcaccatggtggggaccgatgcattccaggaaaccgacatgatcggtatctcccggccgatcgtgaaacacagcttcatgatcaagcatccctcggaaattccggaagtcatgaaaaaggccttctacctcgcgcagtccggtcgcccgggccctgtcgttgtagacatcccgaaagacatgaccaacccggccgagaagttcgaatacatctttccgaagaaagccaagctgcgctcctacagcccggccgttcgtgggcactcggggcaaatccgcaaggcggcagaaatgctcctggcggccaagcgtcctgtgttgtactcgggtggtggcgtcattttgggcggcggctctgcacccttgaccgaactggccaagctgctcaacctgccggtgaccaacaccttgatgggcctcggcgcatttccgggtacggaccgccagttcgtcggcatgctgggcatgcatggcagctacaccgccaacctggccatgcaccacgctgatgtaattctggccgtgggcgcgcggtttgatgaccgtgtgatcaacggcgcgagcaaattctgcccgaacgccaagatcatccatatcgacatcgacccggcgtccatctccaagaccatcaaggccgacgtgccgatcgtgggtcctgtggaaagcgtactgaccgaaatggttgccgcgctcaaggacatcggcgagacaccaaacaaggaatccgttgccagctggtggaagcagatcgacgaatggcgtggcgatcgcggcctgttcccttacgacaagggcgacggcagcatcatcaagccacaaaccgtgatcgaaaccctgtgcgaagtgaccaagggcgatgcctttgtgacctccgacgtgggccagcaccagatgttcgccgcgcagtactacaagttcgacaagcctaaccgctggatcaactccggtggcctgggcacgatgggctttggtttcccggcggccatgggcgtgaagctgagcttccctgacaccgacgtggcgtgcgtcaccggtgagggcagcatccagatgaacatccaggaactgtcgacgtgcctgcagtacggccttccggtgaagatcgtctgcctgaacaacggcgtgctgggcatggttcgtcaatggcaggacatgagctacaacagccgtcactcccattcctacatggagtcgctgccggatttcgtaaaattggttgaagcctatggccacgtcggcatgcgcatcactgatttgaaagatctgaagccgaagatggaagaggcgttcgccatgaaggaccgtctggtgttcctggatattcaggtggataccagcgagcacgtctatccgatgcagatcaaagacggctctatgcgcgacatgtggctgaacaagacggagcgtacttaatcatgcggcatattatctccctgcttctggagaacgaacccggcgctctgtctcgtgttgtcggcctgttttcgcaacgcaactacaacatcgaaagcctgaccgtggctccaaccgaagacccgaccctgtcgcgcctgacgttgaccactgtgggccacgatgaggtgatcgagcagatcaccaagaacctcaacaagctgatcgaagtggtcaagctggtcgacctgtcggaaagtgcccacatcgagcgcgagctgatgctggttaaagtcaaggccacgggcgcccaacgtgccgagatcaaacgcactaccgacatttatcgcgggcagatcgttgatgtgagcgccagcgtttataccgttcaactgaccggtacaagcgacaaactggacagcttcatccagtcgatcgggacggcctcgattctggaaactgtacgcagtggtgtcaccgggattgcccgtggcgacaaagtactcagcatttaacccaattagtgaatggcctcacggcctggatatatagaggaacctcatgaaagtttattacgataaagattgtgacctgtcgatcatccagggcaagaaagtcgccatcatcggttacggctcccaggggcacgcgcaagcgtgcaacctgaaagattccggcgttgacgtgactgttggcctgcgcaaaggctcggccactgttgccaaggctgaagcccacggcctgaaggtgactgacgttgcttccgccgttgcggctgccgacctggtcatgatcctgaccccggacgagttccagtccgcgctgtacaagaacgaaatcgagccgaacatcaagaagggcgccaccctggccttctcccacggcttcgcgattcactacaaccaggttgttccacgtgccgacctcgacgtgatcatgatcgcgccgaaagcaccgggccacaccgtgcgttccgagttcgtcaaaggcggcggcatccctgacctgatcgcgatctaccaggacgcatcgggcaacgccaaaaacgttgcgctgtcctacgcagccggtgttggtggcggtcgtaccggcatcatcgaaaccaccttcaaggacgagactgaaaccgacctgttcggtgaacaagccgttctgtgcggcggtaccgttgagctggtcaaagccggtttcgaaaccctggttgaagctggctacgcgccggaaatggcctacttcgaatgcctgcacgaactgaagctgatcgttgacctcatgtacgaaggcggtatcgccaacatgaactattcgatctccaacaacgccgagtacggcgagtatgtgactggcccggaagtgatcaacgccgagtctcgtcaggccatgcgcaacgccctgaaacgtattcaggacggcgaatacgccaaaatgttcatcagcgaaggcgctaccggctacccttcgatgaccgccaagcgtcgtaacaacgccgctcacggtatcgaaatcatcggcgagcaactgcgctccatgatgccgtggatcggtgccaacaagatcgtcgacaaagccaaaaactaagtcgtacgtatcaagagaaaacgcggcttaggccgcgttttttcgtttgggggcgggttctggtataaagctgcatcgtttgcgggcgaacatgctctgcaagtatttgtcgaattcttttcacaccgttgcaaggtaaagtccatgaccgaacgtcccgaagagccaaaccaggcctctgacgccgaaagcctgctaccgatcgatgaacatgtcgaagaagggcatgatgcggaaggtcgcaaggttcggcatcgtggcatctatcttctgcccaacctgttcaccaccgcgaacctgtttgccggtttttactccatcatcaactccatgagtgcccagagcgcgctggcggcaggtgatgcggcgagcgccagcaagtatttcggttttgcggccatcgccattttcgtggccatggtactcgacggccttgatggtcgtgtggcacgcatgaccaatacccagagtgcttttggtgccgagtacgactcgctgtcggacatggtcgccttcggtgttgcacccgctctgctggcgtttgcctgggcattgggtgatatgggcaaggtcggctggatggttgccttcatttatgtcgcgggtgcagctttgcgtcttgcgcgcttcaatacccaggtgggtaccgctgacaagcgttacttcattggcttggccagcccggcggctgcgggcgtggtagcgggtattgtctgggcattcagcgactacggcatccaggggtcgaagatgtcgttcctggttgccttgatggttgcggcggccggcatgctgatggtcagtaacatcaagtacaacagcttcaaggagttcgatctcaaggggcgcgtgccttttgtggcgattctggtcgtggtactggtgtttgcggtggtattcagcgatccaccgcgcattctgctgttggcgttccttgtctacgcggcttcggggccagttcagtacctgctgcatttgcgccgcgacaaaacattgtcttaatgtaatttcccccatactccgcagtctattggtgcatcagtcctccaatgctgcggagttgccatgttaatcaaattgcccaaagcgtccgattgccacgaatcggatgtcacgcctgaatccttctatctctctcgtcgtagcttgcttggcggtgcgcttgctggcgttgctgccagcgcgttgccacgttgggccagtgccgaagaagctgcgcgctatgccgatgttgagcccggcaacgcaccgaactggtttgccgaaaaactgccgggtacaaaatggcaggcggtgactgtgaaggatgaggccatcacgccgttcaaggacgcaacccactacaacaacttctatgagttcggtacaggcaagggcgacccggcggcgaatgcgggctctctcaagactgagccatggagtgttgtgattgatggcgaagtcgcaaagccggggcgttacgccttggaagacttcatgaagccttatcagttggaagagcggatctaccgtttgcgctgtgtcgaggcgtggtcgatggtcattccctggatgggtttcccgatttcggccttgctcaagcaagttgagccaacgtccaaagccaagtacatccgctttgaaaccctgcaagaccctaaaagcatgccgggtcagcgctcaagctttggtttgatcgactggccttatgtagaggggctgcgtttggatgaggcgatgaacccattggcgattcttgctgtgggcatgtatgggcgagagttgccaaaccagaacggcgcgccgttgcgtttggtggtgccttggaagtatggcttcaagagtgtgaagtccatcgtgcggatcagtcttgtcagtgagcagccgaaaacaacctggcagagcattgctgcagatgaatacgggttttacgcaaatgtgaatccgacggttgatcaccctcgctggacccaggcgcgcgagcgtcgcctcccgagtggtttgtttagccctaatgtgcgtgaaacgcagatgttcaacggctactcggatgaggttgcttctctctataccggtctcgatctgcggaagaactactgatgcgctatcccgtctggcgcattggcgtctttatagctgcggcggtgtggccgttgttctggctttatgaagcgtggagctcggcactcgggcctgatccgggcaaagtaatggttgaccggttggggttgggtaccttgatcctgctgctcatcactttggggatgacaccactgcaaaagttgagcggttgggcggggtggatagccgttcgccggcagttggggctgtggtgctttgcttatgtggtgctgcatttggcggcctactgcgtgttcgtccttgggttggattggtcgcagctgggggtggagctgcgtaagcggccctacatcattgtgggtgccttgggttttctgtctttattggtattggcggtaacgtcgaatcgttacagtcaacgccggcttggtagtcgctggaagaagctgcaccgcctggtttatgtgattctcgggctcggtttgctgcatatgttgtggattgttcgagcggatctcaaggaatgggctatctatgcttctataggtgcgctgcttttagtgctgcggattccccctgtcatgcgccggatcccccgcgttattgcgaaaaaaccactttctgcaacaaaagcgtaattaggggttgacggcagattctggaagtctataattcgccccacttccggcgcagtcgaaacggaaaactccttggtaaacaaagagttatgcgagattcgacagtgagttgcttcagttcatcgaagcccagaaggagttgatagagcggtgtagtttggctctattaacgtttcgatcctctcggtcgaaagcggagaaaaagaggtgttgacagcagcgtgtaacgctgtagaattcgcctcccgctaacgagagatcggaagcgcaagtggttgaagttgttgaagaaatcttcgaaaacttctgaaaataatcacttgacagcaaatgaggctgctgtagaatgcgcgcctcggttgagacgaaagatcttaaccaaccgctctttaacaactgaatcaagcaattcgtgtgggtgcttgtggagtcagactgatagtcaacaagattatcagcatcacaagttactccgcgagaaatcaaagatgtaaccaacgattgctgagccaagtttagggtttcttaaaaacccaaagatgtttgaactgaagagtttgatcatggctcagattgaacgctggcggcaggcctaacacatgcaagtcgagcggtagagagaagcttgcttctcttgagagcggcggacgggtgagtaatgcctaggaatctgcctggtagtgggggataacgttcggaaacggacgctaataccgcatacgtcctacgggagaaagcaggggaccttcgggccttgcgctatcagatgagcctaggtcggattagctagttggtgaggtaatggctcaccaaggcgacgatccgtaactggtctgagaggatgatcagtcacactggaactgagacacggtccagactcctacgggaggcagcagtggggaatattggacaatgggcgaaagcctgatccagccatgccgcgtgtgtgaagaaggtcttcggattgtaaagcactttaagttgggaggaagggttgtagattaatactctgcaattttgacgttaccgacagaataagcaccggctaactctgtgccagcagccgcggtaatacagagggtgcaagcgttaatcggaattactgggcgtaaagcgcgcgtaggtggtttgttaagttggatgtgaaatccccgggctcaacctgggaactgcattcaaaactgactgactagagtatggtagagggtggtggaatttcctgtgtagcggtgaaatgcgtagatataggaaggaacaccagtggcgaaggcgaccacctggactaatactgacactgaggtgcgaaagcgtggggagcaaacaggattagataccctggtagtccacgccgtaaacgatgtcaactagccgttggaagccttgagcttttagtggcgcagctaacgcattaagttgaccgcctggggagtacggccgcaaggttaaaactcaaatgaattgacgggggcccgcacaagcggtggagcatgtggtttaattcgaagcaacgcgaagaaccttaccaggccttgacatccaatgaactttccagagatggattggtgccttcgggaacattgagacaggtgctgcatggctgtcgtcagctcgtgtcgtgagatgttgggttaagtcccgtaacgagcgcaacccttgtccttagttaccagcacgttatggtgggcactctaaggagactgccggtgacaaaccggaggaaggtggggatgacgtcaagtcatcatggcccttacggcctgggctacacacgtgctacaatggtcggtacagagggttgccaagccgcgaggtggagctaatcccataaaaccgatcgtagtccggatcgcagtctgcaactcgactgcgtgaagtcggaatcgctagtaatcgcgaatcagaatgtcgcggtgaatacgttcccgggccttgtacacaccgcccgtcacaccatgggagtgggttgcaccagaagtagctagtctaaccttcgggaggacggttaccacggtgtgattcatgactggggtgaagtcgtaacaaggtagccgtaggggaacctgcggctggatcacctccttaatcgacgacatcagctgctccataagttcccacacgaattgcttgattcattgaagaagacgataagaagcagcccgaaattgggtctgtagctcagttggttagagcgcacccctgataagggtgaggtcggcagttcgaatctgcccagacccaccaattttgtgtgggaaacgcctgtagaaatacggggccatagctcagctgggagagcgcctgccttgcacgcaggaggtcaacggttcgatcccgtttggctccaccactactgcttctacgttatgaaagcttagaaatgagcattccatcaggttgatggtgaatgttgatttctagtctttgattagatcgttctttaaaaatttgggtatgtgatagaaagatagactgaacgttactttcactggtaacggatcaggctaaggtaaaatttgtgagttctcttagttgagaaattcgaattttcggcgaatgttgtcttcacagtataaccagattgcttggggttatatggtcaagtgaagaagcgcatacggtggatgccttggcagtcagaggcgatgaaagacgtggtagcctgcgaaaagcttcggggagtcggcaaacagactttgatccggagatgtctgaatgggggaacccagccatcataagatggttatcttacgctgaatacataggcgtaagaggcgaaccaggggaactgaaacatctaagtaccctgaggaaaagaaatcaaccgagattcccttagtagtggcgagcgaacggggactagcccttaagtggctttgagattagcggaacgctctggaaagtgcggccatagtgggtgatagccctgtacgcgaaaatctcttagtcatgaaatcgagtaggacggagcacgagaaactttgtctgaatatggggggaccatcctccaaggctaaatactactgactgaccgatagtgaactagtaccgtgagggaaaggcgaaaagaaccccggagaggggagtgaaatagatcctgaaaccgtatgcgtacaagcagtgggagcagactttgttctgtgactgcgtaccttttgtataatgggtcagcgacttattttcagtggcgagcttaaccgaataggggaggcgtagcgaaagcgagtcttaatagggcgtctagtcgctgggaatagacccgaaaccgggcgatctatccatgggcaggttgaaggttgggtaacactaactggaggaccgaaccgactaccgttgaaaagttagcggatgacctgtggatcggagtgaaaggctaatcaagctcggagatagctggttctcctcgaaagctatttaggtagcgcctcatgtatcactgtagggggtagagcactgtttcggctagggggtcatcccgacttaccaaaccgatgcaaactccgaatacctacaagtgccgagcatgggagacacacggcgggtgctaacgtccgtcgtgaaaagggaaacaacccagaccgtcagctaaggtcccaaagttatggttaagtgggaaacgatgtgggaaggcttagacagctaggaggttggcttagaagcagccaccctttaaagaaagcgtaatagctcactagtcgagtcggcctgcgcggaagatgtaacggggctcaaaccatacaccgaagctacgggtatcacgtaagtgatgcggtagaggagcgttctgtaagcctgtgaaggtgagttgagaagcttgctggaggtatcagaagtgcgaatgctgacatgagtaacgacaatgggtgtgaaaaacacccacgccgaaagaccaaggtttcctgcgcaacgttaatcgacgcagggttagtcggtccctaaggcgaggctgaaaagcgtagtcgatggaaaacaggttaatattcctgtacttctggttattgcgatggagggacggagaaggctaggccagcttggcgttggttgtccaagtttaaggtggtaggctgagatcttaggtaaatccgggatcttaaggccgagagctgatgacgagctaacttttagttagcgaagtggttgatgccatgcttccaagaaaagcttctaagcttcaggtaaccaggaaccgtaccccaaaccgacacaggtggttgggtagagaataccaaggcgcttgagagaactcgggtgaaggaactaggcaaaatggcaccgtaacttcgggagaaggtgcgccggtgagggtgaaggacttgctccgtaagctcatgccggtcgaagataccaggccgctgcgactgtttattaaaaacacagcactctgcaaacacgaaagtggacgtatagggtgtgacgcctgcccggtgccggaaggttaattgatggggttagctaacgcgaagctcttgatcgaagccccggtaaacggcggccgtaactataacggtcctaaggtagcgaaattccttgtcgggtaagttccgacctgcacgaatggcgtaacgatggcggcgctgtctccacccgagactcagtgaaattgaaatcgctgtgaagatgcagtgtatccgcggctagacggaaagaccccgtgaacctttactatagctttgcactggactttgaatttgcttgtgtaggataggtgggaggctttgaagcgtggacgccagtctgcgtggagccatccttgaaataccaccctggcaactttgaggttctaactcaggtccgttatccggatcgaggacagtgtatggtgggtagtttgactggggcggtctcctcctaaagagtaacggaggagtacgaaggtgcgctcagaccggtcggaaatcggtcgtagagtataaaggcaaaagcgcgcttgactgcgagacagacacgtcgagcaggtacgaaagtaggtcttagtgatccggtggttctgtatggaagggccatcgctcaacggataaaaggtactccggggataacaggctgataccgcccaagagttcatatcgacggcggtgtttggcacctcgatgtcggctcatcacatcctggggctgaagccggtcccaagggtatggctgttcgccatttaaagtggtacgcgagctgggtttagaacgtcgtgagacagttcggtccctatctgccgtggacgtttgagatttgagaggggctgctcctagtacgagaggaccggagtggacgaacctctggtgttccggttgtcacgccagtggcattgccgggtagctatgttcggaatagataaccgctgaaagcatctaagcgggaaactagcctcaagatgagatctcactggaaccttgagttccctgaagggccgtcgaagactacgacgttgataggttgggtgtgtaagcgctgtgaggcgttgagctaaccaatactaattgcccgtgaggcttgaccatataacacccaagcaatttgactactctaacgagcatcagattgcggtgtgtgaagacgagatgaaccgaaagttcgacgttcacaaaacaccgaaagctgtcacatacccaatttgctgaagcggggcataagccacgactcagtacccgaatttcttgacgaccatagagcattggaaccacctgatcccatcccgaactcagtagtgaaacgatgcatcgccgatggtagtgtggggtttccccatgtgagagtaggtcatcgtcaagattaaattccagaacccctgtttgctaacgcaaacaggggttttgttttgggcggtcggaaatattcctgcgacctgcgcttgatccggccagcctcgcttacagcttgcagtcgccttcaatgctaaagtctttccctcgattttgcttttcccaaggaagccgttatgccggatgcgacgtccctcagcgctggattcatggtggttcatggcaaccgcctggacgaactgcgcagcttggtcgtcagttggatgcgtcgttatcccctggcaccgctggaaaatgaaatagccttggttcaaagcaatggtatcgcccaatggctcaagctggccttggccgaagacccggaagaggacgacatgggagggtgtggcatcgccgcagcagtcgacgttcaactgcccggcagctttatgtggcagctctaccgcatggttctgggcaaagatgaaatcccgcaaaagtccttgctcgataaggccccactgacctggcgcctgatgcgcttactccccgaacttattgatcagccgcacttcgagccgttgcagcgcttcctcacccacgacaccgacctgcgtaaacgctaccaactcgccgaacgcctggctgacctgttcgaccaataccaggtctatcgtgcggactggctcgaagactgggctgctggtcgccaccaactgcgtaacggtcgaggtgaatccaagcccctgaaccctgcaaattgctggcaagctgagttatggcgcgcgctgctgctggatgtgggtgaagagggtatggccgatagccgagcgggcgttcaccaacgcttcatcgagcgcatcaataccctggaacaagccccctcgggcctgccgccccgagtgatcgttttcggcatttcttcgttaccggcgcaggcactggaggcactcgctggcctggcgcgcttcagtcaggttttgctgtgcgtacacaatccttgccgccatcactggtccgacatcgttgccgacaaagacttgctgcgtaacgaatacaaacgccaagcgcgcaaggccgggatgccggtggccatcgacccgcaagctctgcatcagcatgctcatccgctgttggccgcctggggcaaacaaggccgcgactacatcagcctgctggacagctacgacgacccaaacagctaccgcgcggcgttccgcgatggccgcatcgacctgttcagcgacagcgaacccaccacgctgctcaatcaactccaggacgacattctggagttgcgcccactcaatgaaacccgcgacctatggcctgctgtgaatctggagcgtgacacttcaatccgcttccacatcgcccacagcgcccaacgcgaagtggaaatactccacgaccaactgcttcagcgtttcagcgccgaccccacgctgcgcccgcgcgacatcatcgtcatggttcccgacgtcgacagctacgcgccgcacatccgcgccgtgttcggccagctcgagcgaaatgaccctcgcttcatcccgttcaccctcactgaccagggccaacgcggccgtgacccgctgctgatcgccgtcgaacacctgctgaaactcccggacagccgcttccccgtcagcgaaatcctcgacctgctcgacgtccccgccttgcgagaacgtttcgccatcaaagagcgcgacctgcccacgctgcaccgctggatcgaaggtgccggcatccgctggggtctcaacgctgaacagcgcgcgggcctcggcctacccagtgaactcgaacaaaacagctggcgattcggcctgcgccgcatgctgctgggttacgccgtcggcaccggtattgcgtgcgacggcatcgagccctacgacgaaatcggcggcctcgacgctgcactgatcggcccgctggtcgccttgctcgatgcgctcaacgatgctcatcatgccctgtccgagcccgcaacgccgcagcaatggggcgagcgcctgcaacgcctgatgcatctgttcttcctgcccagcagcgaacacgacgactacctgttgagccagctcgaacaactcagggaaacctggttggaaacctgcgagtccgttggtttgcaggatgagttaccgctaaccgtagtccgtgaagcctggctcgccggtctggaccagggccgcctgtcccaacgctttctcgctggagctgtcaatttctgcacgttgatgcccatgcgcgctatcccgttcaaactcgtctgcctgcttggcatgaacgacggtgactacccgcgcgcccaacccccgctggacttcgacctgatgggcagcgactaccgccccggcgaccgttcacgccgtgaagacgaccgctacctgctgctcgaagccctgctgtccgcccgcgaccagctgtatatcagctgggtgggccgcagcatccgcgacaacagtgagcgcccggcgtcggtgctcatcggccaactgcgcgaccacctcgccagcggctggcacaatgcacacaccgacgaaccattgctggaagcgatgacccaagagcacccactccagccgttcagcgcacgctacttccacgaaggcgacccgctattcagctacgcccgcgaatggcagttgctgcacgaaacgcctcacgcccttgcagcagaagacgaactggcgcagcaccaacaagaagagcccctgaccctcggccaattgcaggacttcctgcgcaacccggtcaaacatttcttcagccagcgtctgaaagtgttcttcgaagccgccgaagtgccgctcgccgacgaagagccattcgtcctcgacgctcttcagcgctacagcctcagcgacagcctgctcaacgctgcactgactcagcccgagcacgtcaaccaggctctcaacgcccaggccctgcgtctgcaaggcagtggcctgctgccaatggtgggttttggcgagtgcctgcgcaacgagttgatcgaaccgttacccgacctgctgcaacgttatcaacatttactcgcactctggccaacgccacatcccacagctgaaccgatcagttttgagcatcaaggcctccagctggaaggctggatcagcggcctgcaccggcgcggtgatggtggattgttaagcgtcaccaccattcccaacagcatcggttcgatcaagacgcgcaagtggcatcgcctgatccgcccttgggtcaaccacgtagtggcctgcgcctgtggcttgcaactcagcaccggtttggtcgccagtgacgacacgttgttactggccccgctggataaatccgtcgcccgggaaatcctcggtaacctgctcttggcctggcacaccggcatgcgtaaaccgctccccgtggcggtgaaaacggccttcgcctggctcggccaaaccgaccccgccaaggcgcacgccgcagccagtaaagcctacgaaggcgacggcataaatagcgacggcgagcgccgcgaaaccccggcgctcacccgccaattccctgacttcgccacgctcatcgccagcgaagaattcgaaggctgggccgaaaccctgtatcgccccctgatcaacgccccttggcgatcgctcaccggcgaggaggccagcgcatgacccgcaaacctttagccctggccttcccgctgaagggcagccaactgattgaagccagtgccggcaccggcaaaaccttcaccatctccgccctgtatttgcggctggtgctaggccatggtggcgacgcatccggcttcggccgcgaactgctgccgccgcaaatcctggtggtgacctttaccgacgccgccaccaaggagttgcgtgagcgcattcggatccggctggccgaagccgcacgttttttccgcgacgagatcgaacagcccgacgccctgattgccgacctgcgtgatgaatacgccgccgagcaatggcccgcctgcgccaaccggctggacatcgccgcgcaatggatggacgaagcggctgtttccaccatccacagttggtgccagcgcatgctgcgcgaacacgcgttcgacagcggcagcctgttcacccaaaccctggaaaccgaccatagcgacctgcttggcgaagtgctgcgcgactactggcgcctgttctgctacccgatgcacgacgacgcgctcaactgggtgcgcaacaactggggtggccccgcagcgttgatgccgcgggtgcgcgcactgttcagcagcgaacggccaaccgatgaaacccgcgagcctgccgagctgattacggcttgcctgcaagagcgccgcgaagcgctgacaaccctcaaggccccatggcaacaatgggccgccgagctgcgcgacatctgcctgcaagccgtggccgccaaagccgtcgacggccgcaagatgcaggcccgctatttcgagccgtggttcgaaaagatcagcgcctgggctgctgacgaaaccctcgaacagctcgacatcggcaccggcttcacccgcctcacgccggacggcatggccgaagcctggaaaggcgagccgccgcaccaccccggtatcgacgccatggccggcctcaaagccagcctcgacgccttgccaacgcccgacgcggccgtgcttcaacatgccgccggctgggtcggcaaacgcttcgaagaagaaaagcgccgtcgcgccgaaatgggtttcgacgacatgctcatccgtctcaacgcagccctgcagtcagacggcggcgagcgcctggccagtgtgattcgcgagcagttcccggtcgccctgatcgacgaattccaggacaccgaccccgtgcaatacagcatcttcgacagcatttaccgcatcgaagaaaaccacctcgacagtggcctgtttctgatcggcgaccccaagcaggcgatctacgcctttcgtggcgccgacatctacacctacctgcgtgcgcgccagtccaccgcaggccgtcaccacacgctgggcaccaacttccgctccagccacgcgatggtcgaagcggtgaaccatgtgtcccagcgtgctgaaaaaggccgtggtgcgttcctgtttcgcgaaccgaatggcgacaacccggtgccgttccactcggtgttgtcccagggccgaaaagagcaattacaggtcaacggccagacactgccggcgatgaacctctggcacttgcccaccgatcaaccgatttccaacgcggtgtatcgccagcaactggccgctgcctgcgccacgcagattgttgagttgctcaacggcgggcagcagggcgcagcaggcttcctgcagcctgacgccagtttcaagggcgtgctcccgtcagacatcgccatcctcgttcgcgacggcaaggaagcccaagcggtacgggccgaactggccgcccgtggcgtacgcagcgtttacctgtccgacaaggattcggttttcgccgcccaggaagcccacgacctgctggcctggctcaaagcctgcgccgagccggatgtcgagcgcccgctgcgtgccgccctggcctgcgtcaccttgaacctgtcactgccggagctggagcgtctgaatcaggatgaactggcgtgggaatcccgcgttatgcagttccggggttaccgccagatctggcgaacccaaggcgtgctgccgatgctgcgtcgtctgcttcacgatttcagattgccgcaaaccctgatcgcccgcagcgatggcgagcgtgtgctgaccaacctgttgcacctcagcgaattgctgcagcaagccgcgtcggaactcgacggcgagcaagcgctgattcgtcacttggccgaacaccttgcactgtcggggcaggccggtgaagaacaaatcctgcgcctggaaagtgatgagcaactggtcaaggtcgtgaccatccacaagtccaaaggcctcgaatacgacctggtattcctgcctttcatctgctcggccaagccggtagacggtagccgcctgccgcttcactaccatgatgaaaacggcaaatcccacgtcagcctgcgcccgactgccgagttgatcgccagggccgacgacgagcgtctggccgaagacttgcgtctgttctatgtcgcgctgacccgcgccaaacacgcgtgttggctcggcattgccgacctcaaacgcggcaacagcagcagctcggtcttgcacctgtcggccttgggctatctgcttggcgccggagcaccgctgggtgaatccgccggtctggcacgctggctgctggacgtacaggagggttgcccggccatcgattacgctaccgtacccgacgctcaagacatcctgttccacccgccacgcaataccgccacgttactcgcgcctttgctgcccaaacgcaaagccgccgaaaactggtggattgcttcctacagcgctctgcgaatcggcgacagcatgagcgcctccacgcttgaagcgccggaaagcccacaagcccagaagctgttcgacgacgaacgcctcgaccccgacgcaccgcgcgaagtggcggcgtccggcggcgacattcaccgtttcccacgcggtccgaatcccggcaccttcctccacggcctgctggagtgggcgggcgaagagggcttcaacgtaacgcccgaggccattgaaaaagccgtgggcgcgcgctgtaaccggcgcaactgggaaggctggatcgtcaccctcagcggttggctcggccacctgttgcagactccgttgccggtggacaacgacgccgtcaccctcagcggcctgcagcagtatcagatcgaaatggaattctggttcgccagccataaagtcgacgtgctcgccctcgacaagctggtgtgccaatacacccacaacggcgtgtcccgcgtggccgccgaaccggtattgctcaatggcatgttcaagggctttatcgacctgaccttcgaacatgacggccgctattacgtggccgactacaaatccaactggctcggccctgacgattcggcctacacctgggaggccatgaatcagtcgatcctcgatcatcgatatgacctgcaatacgtgctttacctgctggccttgcaccgccagctgaaggcacgcctgccgggctacgactatgaccgccatgtcggcggcgcgctgtatgtgttcctgcgcggcactcagtcggccagcaaaggtgcgtatttcacccggccgccacgggagctgatcgaaggcctggatttgctgttccagggcaagcccatcccgcccaaggttgagcccgcctgggaacaaggagtgttgttatgagcctcgcaccgttaccgctggaggcgctgctgcctctgagccgcgccgctgacctggtgcaactgttggaacgttgggttgatcgcggttggctgcgcgccctggacaaagcctttgtcggcttcctgcacgaactcgatccgcaggccgatcctctggtgctgttggccgcggcgttgaccagccatcaactgggccacggccatgtgtgtctcgatctgttcgaaaccctcaaggcacccgatttcgccctgtccttgccacctgaaggcgacctgcaaaccggcgccatgctgctgccatcgcaactgctcgacggcctggatggcgcccactggtgccatgcgctggccgccagccatatggtcgcgttggccgtcgatggcagtgagtcggcccacagtcgcccgctggtgttgtcgggcaagcgcctgtacctgcgccgctactggacctatgaacggcgcattgaccgtgctttgcgtcggcgtctggcaacgcaggaaaacgtcgctgccgatttgccgcaacgcctcaacagcttgttcgaccaaccgccaccggagggggtgatcgactggcaaaaactcgcctgcgcgctggcgactcgcggtgccttcagcatcgtcaccggcggccccggcaccggtaaaaccaccaccgtggtgcgcctgctcgcgttgctccaagcacccgccgtggacgccggcagcccattgcgcatccgcctcgccgcgccgaccggtaaagcggctgcgcgcttgaccgagtccatcagccagcaagtgcagtcgctgacagtgcccgacagcgtgcgggaaaaaatcccgacccaggtcaccaccgttcaccgcctgctgggcagccgcccgggcacgcggcattttcgccatcacatcgccaaccccttgcctttggatgtgctggtggtcgacgaagcctcgatgatcgacctggaaatgatggccaacctgttggacgccttgccgccccacgcccgtttggtgctgctgggcgacaaggaccaactcgcgtcggtggaggccggcgccgtactcggtgatttgtgccgcgacgccgaagccggctggtacaacccggctacgcgccaatggctgcaagctgtcagtggtgaaaacctcagcgccagtggcctgcaagaagacctcgacggcagtcatccgctcgcgcaacaagtcgtcatgctgcgttactcgcggcgtttcggcgaaggcagcggcattggtcaactggcgcgctgggtcaaccagcaaaatgccgaagaagcccgcaaactgctggccgcacgcagccatgacgacctgttctgcgtcagcctcaaaggcgaacacgaccacgcccttgaacgtttggttctggacgggcagggcgacggcgctgaaggttatcgcttctacctcaacctgcttcacagcgcgcgcccggcgctcgacaccccgcgcgaggccccggcctggactcactgggcgcaacaattgctgcaagccttcgacgcctttcaactgctctgcgccgtccgcaaaggcccatggggcgtagaagggctgaacctgcgcatcaccgccgcgttgcgcaaagtaaagctgatcgaaggcgacgaccaatggtacgaaggccgcccggtcttgatgacccgcaacgattacggcctgggcctgatgaacggtgatatcggcatcgccctcaaactgcccgaaagcaatggcggctcccacgtgctgcgtgtggccttcccgcgtaacgatggccagggtggcgtgcgctttgtactgcccagccgcctgaatgacgtggaaaccgtgtacgccatgaccgtgcataaatcccagggctcggaatttacccacactgcgttgatcctgccggatgccctcaacccggtgctgaccaaagagctgatctacaccggcatcacccgcgccaaacgctggttcagcctgatcgaaccgcgtaatggtgtgtttgaggaggcggttcggcgcaaggtcaaacgcctgagtgggttgatgctggaactggacgctgcttctgaagaaactgactgacaggtcacggaatatttctgatccagttgcctgatttttctgaaaaaatggcggccctcgcgaaaccctggcttcgtggggttttccgccgctgtgctatcgttgcggcatcaccctgaaaaacacctgagagtattgctgcatgaacgtggctgtctcgcccacagagcgcagtttgagctggagacgcatgttactggtggcggtgctgtgcctgttcgcgtcccgcgcattagcccagacgcccagcctggcagatcaccgtgcgcagtcggtgacgcaagtggtgctcggtattctcagctatgcgcgttggccggtggagcccgcacaactgcggttgtgcatcgtcggcccgacccaatacaccgacgacctgatcaaaggcaccacccaggccaccggccgcccggtggtggtgcggcgtttgctggcggacaatcccgatatcgtcagtgcttgcgacgccgtgtacatcggcaaactctccgatgatgagcgcagccgcctgttcgcgtcgttgatcggccacccggtgctgagcatcagcgaaggcggcgaccaatgcaccgtgggcagcctgttctgcctgcgcgtggcggatgagcaagtctcgttcgaggtcaacctggactctgttgcccgcagcggcgtgcgcattcaccccagcgtgctccaattgtcgcgacgtcgagcgcctgcgccatgagcactgcaaaagcgcggccgacgctgcgttcggtcattggccgtgggcacctgatcctggcgttggtggccgtgaccctggccagcgtgtcgctgaccctgctcggcgtgctggcgttgcgggtgtatgccgaacacaacctgcatttgatcgcgcgctccatcaactacaccgtggaagcggcggtggtgttcgacgacagctcagcggccaccgaagccctcagcttgattgcctccaccgaggaggtcgcccaggccgaagtgttcgacgccaatggcaagctgctggcgcaatgggttcgcccggacactggaatgttgtcgcaggttgaactggcattggcgcataccctgctcgaacagccaatcaaccagccgatcctgcaccagggcaaaaccatcggcagtatccatgtggtcggccacggcggcagcctgctgcgctttctgctcagcggcctggccggtattctgatttgcaccgccctcagcgcctgggtggccttgcacctcgcgcggcgcctgttgcgcggcatcaccggcccgttgcaaaagctcgccgccgtggcccacgccgcccgcagcgagcgtgactttgaccggcgcgtgccaccggcgcagatcgctgagctcgacagcctgggcagtgacttcaacgccttgcttggcgagatggaggcctggcaaagccatttgcaaagcgaaaacgaaaccctcgcccaccaggccagccacgacagcctgaccggcctgcccaaccgcgcattcttcgaaggccggctgatccgcgccctgcgcagcgccgccaaggtcaatgagaaagtggccgtgctgtttctcgacagcgaccgcttcaaagacatcaacgacaacttcggccacgctgccggtgatgccgtgctggtggccgtcgccgagcgtgtgcgcgcgcaactgcgtgaggacgacctggtggcgcgtttgggcggcgacgaattcgccatcctgctggcgccgttgcacaaggccgaagacgcccggcgcatcgccgacaagatcattgccagcatggacctgccgatcccggtgcctggcaacacccaagtgttgacctccctcagtatcggcatcgccatctaccctgaccatggcgccactcccggcaccttgctcaacgccgccgatgcggcgatgtaccaggccaagcggctgtcttcgggtggccagcacacggcggaggcggagcctaccgctgccaacgttcaacacaggagttgaccccttgttcactaatgcgcgttttatgtttatcactttgctggtggccttgctggccctcggcggctgtcagaccgcgccgcccaaggggctgaccccggcgcaagtcgcggtcctcaaacagcaaggctttgagttgaccgacgaaggctgggcgtttggcctctccggcaaagtgctgtttggcagtgacgtggaaagccttaacaaagccagtaccgacatcgttgagcgcatcggcaaagctttggtcagcgtgggcatcgaacgcgtacgcgtggacggccacaccgacgcctcgggcaaagaaccttacaaccggcaactgtccctgcgccgcgcgaaaagtgtgggcaaagtgctgacgggtgtggggatgaaggaagagaacatccagctgcgtggcctgggcagcagcgaaccggtggcgccgaacaccacggtggcggggcgtaccgagaatcggcgggtgtcgattgtagtcatcgccgactgagcaatccgcccgctccaccgtgaaatgcaatccaatgtgggagcgggcttgcccgcgaatgcggtcattcagccaagaatttattacctgacccaccgccatcgcaggcaagccagctcccacacttatttgtggaaagccggaattttgtgcccgacgcagttcaagcgtgagagcggtgttcacttagttgcccggcgggctctttaatccgcaaaccgcatctcccgcgtttcccccatcaacaacccctgattctgctccgtcacttcccggatgtagtcccacaacaacgtaatccgcttcaacttcctcagatcctcccggcaatacatccaaaactgccgcgtaatcgaaatctgctcccccagcaccggcaacaaccgcgggtcctgtgccgcgagaaagcacgggagtatcgccatcgaccggccctgctgcgccgccacgtactgcgcgatcacgctggtactgcgcaaacttgcgctggcgccgggcactacgtttgccaggtacagcaactccgaactgaacgctaaatcatccacatagctgataaacggatgctcggccaaatccgccggtttgcggatcggcgggtgttgatcgaggtattcctgggtcgcatacagctgcaatttgtaatcacacaatttgcagcacacatacggcccatgttccgggcgttccagggcgatgacgatgtcggcttcgcgtttggacaaactgatgaagtggggcaggggcaggatgtccaccgagatcgccgggtaggtgtcgacgaaatggctcagttgcggggtgacaaagaagctgccaaacccttcggtacagcccatgcgcacatgcccggacaatgccacgccggagccggacacctgctcgcaggccatgtgcagggtgctttcgatggactccgcgtaccccagcaaacgctggccttcggtggtcagcacaaagccgttggtccgggatttttcgaacagcaacgtgccgagggacacttccagtgagctgatgcgccgcgacacggtggtgtagtccaccgccaggcgcttggcagccacgctggccttgcgggtacgggccacttcgaggaaaaacttcaggtcatcccagttcagggagcctaatgacgtgatgtttttttgcatattggaccggcttttatgtgcgttcttattagagatttgcacatctatactcgaaaaacagtccgaacgcctcatttccaaggcgattcacgcgccttgtctctgcataactacaagattggagaccacatgaacgcttctgccgatatttccgtgcaacaggtcaagttgctgatcaatggtgaatgggtcgaatccaaaaccactcactggcaagacgtcgtcaacccggccacccaagaggtgctggccaaagtcccgtttgccaccgccgatgaagtcaacgccgctatcgatgccgcacaccgcgccttccagacctggaagctgacgcccatcggcgcgcgcatgcgcatcatgctcaagctgcaagccttgatccgcgaacattccaagcgtattgccactgtcctcagcgccgagcagggcaaaaccattgccgatgccgaaggtgatattttccgtggcctggaagtggttgaacacgcgtgctccatcggcactttgcagatgggtgaattcgctgaaaacgtcgccggtggcgtcgacacctacaccctgcgccaaccgatcggtgtgtgtgcgggcatcaccccgttcaacttcccggcaatgattccgctgtggatgttcccgatggccatcgcctgcggcaacaccttcgtcctcaagccgtccgaacaggacccgctgtcgaccgtgctgctggtggagctggcgctggaagccggcgtaccgccaggcgtgttgaacgtggtgcacggcggcaaagacgtggtggatgcgctgtgcacccataaagacatcaaggctgtgtcgttcgtcggttcgactgccgttggcactcacgtgtacgacctcgccggcaaacacggcaagcgcgtgcagtcgatgatgggcgccaagaaccacgccgtggtgctgccggacgccaaccgcgaacacacgctgaatgctctggtgggtgccggtttcggtgcggcgggccagcgttgcatggccacctctgtcgtggtgctggtgggcgcctccaaacagtggctgccggacctgaaagcgctggcgcagaaactcaaggtcaatgccggtagcgaagccggtaccgatgtgggcccggtgatttccaagcgcgccaaggcacgcatcctggagctgatcgaaagcggtgtgaaagaaggcgccacgctggagctggatggccgcgacgtcaaggtgccgggtttcgagcaaggcaacttcatcggcccgacgctgttctcgggcgtgaccacggacatgcagatctacacccaggaaatcttcggcccggtgctggtggtgctcgaagtcgcgaccctcgacgaggccatcgcactggtcaacgccaacccgttcggcaacggcactggcctgttcacccagagcggtgcggcggcgcgcaaattccagagcgaaatcgatgtgggccaggtcggcatcaacatcccgattccggtacccgtcccattcttcagcttcaccggttcgcgaggctccaagctcggcgacctgggcccgtacggcaagcaagtggtgcagttctacacccagaccaaaaccgtcaccagccgctggttcgacgacgacacggtcaacgatggcgtcaacaccaccatcaacctgcgctgatttcgggagacgaccatgaagattgcatttatcggcctgggcaacatgggcgcgcccatggcccgcaacctgatcaaggctggccacacgctgaacctgtttgacctgaaccaggcggtactcaaggaactcgccgagctgggcggcagtatcagcggctcgccgcgtgatgcggccagcggcgctgaactggtgattaccatgctgcccgccgccgcccatgtgcgcagcgtgtggctcagtgaagacggcgtgctggcaggcatcggcaacggcgtgccggcggtggattgcagcaccatcgacccgcagaccattcgcgatgtgtccgctgcggcggccaaacaaggtgtggtcgtggccgatgcgcccgtctccggcggcaccggcggcgcgcaggcgggcacgctgaccttcatggtcggcgccaccccggaactgttcgccacgctgcaaccggtgctggcgcaaatgggccgtaacatcgtgcattgcggtgacgtcggcaccggccagatcgccaagatctgcaacaacctgctgctgggcatcagcatggtcggcgtcagcgaagccatggccttgggcgacgcactgggcatcgacactcaggtgctggcggggatcatcaacagctccaccgggcgctgctggagttcggacacttacaacccttggccgggcgtgattgaaacggcgccgtcttcccggggttacacaggcggcttcggtgccgacctgatgctcaaggatctggggttggctaccgaggctgcacgccaggtgaaacagccggtgatccttggcgccgtggctcagcagttgtatcaatcgatgagccagcgcggggacggcggcaaagacttctcggccatcatcaacagctatcgcaaaccctaataggggattttccgggggcccgcgtcgggcgggtccccgggtttttggttgatacagcgctcctccctcattcaaggccattctgcgcctgccgctcgccccctcatttttgaaaatgacttcctcttccgctaatggcggagacatctttgcgccctgaaattaatacaccctatatacatatataggtttcagttattactaaccgactaactagttggcgtgaacttttcgacgctgaatgtatcgttgaaatatgattttacaagtttgtaatattgatgagttgcgcctgttttttacaacggtctcatcactcggtgcgcagggggaaagtgtgtcgttatcatgctgtggtaatgaattaatacatgatgtgcgatcaatgtgtggtgagtgttttgtttaaaggcgcatgtttaatgtgtgtttagttttccctttgatgttgactatcgcctcgttagtatcggcctcgcgggcgttgtcggcggcgtcatgtctcgagagttcccgctcaaaggttgtactttttaaagttgtgcaggtgtgtcagagatggctaacgaaaggaatcgtacatcgggtatccccgggcactcggccacatcggccgacgctgcccgggagcttgaaaaggcccgtctcgcggcccgccatctctcccgattacttgatctctgggcttgcgggcataccagcccctctcctgaatccgcaccaacacgttgcacgtccgagtgggtcgacgtgcaaccgcgtgaagaaaccggcgtgggttgatctgcgcggattctgaacagcccttaaataacgcaacaacacgtttagtgctcggcggtcatgaccgccgtgggcattcgctcgcgctgaactctgcgtgtccatcgatagaaacgggtgaaagatgaaaaacataacaattgtcgacaaggcgacgggggcggcgacggaacatgcctttggcaatgccagccttaaaggaaccagcattgtaaaactgcccttcggaccggaaagcgttcaaacctttcaacagtccggccagaatttggtggtcactctgaagtccggagaaaccgtcactattcagaacttttttgtggtgggcgacgacggcgcgacgaaccaactggttctggagaacgccgacggaacacttttgctgggcaactattccaccccgtattcgggcttcaactttacccagatttcaaccctcgacgacttgggcgttgccgccatcgccgccgacagttcgatcccgagctgggtgctgtgggggctggggattcttgctgtgggcggtgccgcagcggccatcggtggtggcggtggtggtgggggcggtcatcatgatgcgccgccgcccgtcacaccgcccgcgaccccgccaggggcggcgagcgggttgtcagtgaacagcgcgggcacggttctcagcggtaagggccagggcggcaccaccgtgacggtcaaggatgctgccggcaatgtgatcggcaccgggactgtcggtgcagacggtaatttccagatcaacctgggcacgccgcaaaccaatggcgaaaccctgcaagttgtcctgaaggatgggcagggcaaagaatcaccagcgagcaccgtggacgcgcccgataccaccgcgcctgccgccgcgactgcgctggaagtcagccccgatggcaccattctcaccggcaagggcgaacccaatgccactgtcaccatcaccgacgccaacggcaacgtgatcggtaccggtacggtgggggctgacggcaatttccaggtcaccctgactacgccacagaccaacggcgaaacgctcaacgtcgtcctcaaggatgccgccggcaatgcatcgcccgccagccccgttgtggccggtgatactaccgcgcccgccgcgccaaccgacctgacgatcagtgccgacggcgcaacggtcagcggtaaaggtgagcccaacaccgcagtgaccatcaaggacaccggcggcaacgtgatcggcaccgggactgtgggggccgacggcaccttccaggtgtcactcaacaccccggcgaccgagggcgagagcctgcaagtcaccctgaccgatggcgccggcaatcaatcgcttcccggtggcttgctggttgcagacattgaaacgccgctggcgcccaggaacctctcgatcagcgaagcgggcgataccctcagcggcgaaggctcggccaatcacgacgtcacggtgctcaacgacgccggcgaagtggtcggcacgggcaccgtgggggatgatggtaccttcgtacttcaactcaattcattgcatgtcaacggcgagcgcctgagggttttcctcaaaaacttttccggcaaggagtcgctgccaggcactgcgttcgcgggcgacaccatcgctcccgacgccccgaccaacctggcggtcagcccggaaggcgccaccgtcagcggcaagggcgagcccggcgcgaccgttaccgtcaaggatgccgacggcaacgtcatcggcaccggcaccgtgggcgacgacgcaaacttccaggtcaccctggacccgcctcaagtcaacggcgaaaccctcagcgtcacgctgacggatgcgtcggggaacgagtctgttccggctaccgtggttgcggttgatatagacgacaacgacgctgatgccgatgccgatgccgatgccgatgccgatgccgatgccgacgccgacgctgatgccgatgctgacgccgacgccgacgctgatgctgatgccgatgccgatgccgatgcgacgccgatgccgatgccgatgcggatgcggatgcggatgctgacgccgatgccgatgccgatgccgatgccgatgctgacgccgatgccgatgccgatgccgacgctgacgccgatgccgatgccgatgccgatgccgatgccgatgctgatgctgatgctgatgccgatgctgacgccgacgctgatgctgacgccgatgccgatgccgatgccgatgccgatgccgatgcggatgcggatgcagatgccgatgctgatgccgacgccgacgccgacgccgacgccgatgctgatgccgatgccgatgccgatgccgacgccgatgctgatgctgatgctgatgctgatgctgatgctgatgctgatgccgatgccgatgccgatgccgatgcggatgccgatgccgatgcggatgcggatgccgacgctgatgctgacgccgatgccgatgccgatgccgatgccgatgctgacgccgacgccgatgccgacgccgatgctgacgccgatgctgatgctgatgccgatgccgatgccgatgccgacgctgatgctgatgatgatgctgatgctgatgctgatgccgacgccgatgccgatgctgatgctgatgctgatgctgatgctgatgctgatgctgatgctgatgctgatgccgatgctgacgccgacgctgatgctgatgccgatgccgatgatgccgatgccgatgctgatgcggatgcggatgccgatgccgatgctgatgcggatgcggatgccgatgccgatgccgatgctgacgccgacgccgacgccgacgccgatgcggatgcggatgccgatgccgatgccgatgccgatgctgatgcggatgccgacgctgatgctgacgccgatgccgatgcggatgcggatgcagatgccgatgctgatgccgacgccgacgccgacgccgacgccgatgccgatgccgacgccgacgccgacgccgacgccgatgctgatgccgatgccgatgccgatgccgatgccgatgccgacgccgatgcggatgcggatgcagatgcagatgccgacgctgatgctgacgccgatgccgatgccgatgccgatgccgatgccgacgctgatgctgatgccgacgccgatgctgatgccgatgcggatgcggatgctgacgccgatgcggatgcggatgccgacgctgacgccgatgccgacgccgatgccgatgcggatgccgatgctgatgctgatgctgatgctgatgctgatgctgatgctgatgctgatgctgatgcggatgcggatgcggatgcggatgccgatgccgatgccgatgccgatgctgacgccgacgccgacgccgacgctgacgccgatgctgacgccgacgccgacgccgacgctgacgccgacgccgacgccgacgccgacgccgacgccgacgccgatgccgacgccgatgccgacgccgacgccgacctcgaagccttcgacgacctcgccaccagtgaagtgacgatcaaacccgtcacctccaataccaacctggccgatatgcgtgtcttcaccctgttggggatcggcgggatcatcctgggcgatcacaccaaaacgcaggaattctcggtctccgaggggaccactggcacgctgaacctgcagttcgcccaggcggatctggtctcactgttgggcggtggtttcactgcgattctggaggtgagcgacggtgccggtggctggttgccggttcaacaaggcagcaacggttcgggcttgctcgacctgctgggcctgttcggccaaagctccagcgccaagatcgaagggctggaagccgggcaataccgcttcaccctcaagctcgatccgaacctggtgagcattggggcgggcgcgacggccaacttgagtgtcacccacgaaagcctgactgatttcaccggcgaggcgggtccggaaatttccggcaacgtcatcaccgacccaggcgtaggcggccaaccggatgtgccgggcattggcgggccggtgaaggtgcaggttgaggtcggcggcgagttcgtcgatgccgatgccaccaccggtacggtgctgcaaggtcaatacggtcaactgacgatcttcgccaacggcgactacaagtacaccccgaatggcgatatcgccaacatcggcaaggtggatgctttcgagtatcacctggtcaatggtgccggcggttcggcttcagccaccttgtacgtgcgcatcgacagcccaagtgtcgacgtgacctggaacgatgccaacccatcggcgccgggggttatcaacacggttgccaacgatgacctgggttcggcgcagatcgagatcgtcaacctggtgaccgagacgaccgcaccgtccttgacctacaacctgccggcacttggcacgggaacgggaacggggcaagtcatcgtcgtcgcggcagattccaccgctgtgttgaaagtcgatgtcagcgccaccggcattacgctgttgccgaccaccaccgtcaacttgcaaaagctgattgacggtacgtggaccacggtgcagaccactacccaagcgtcgcatacgttcaccgggctggacgccggttcgtatcgcgtcaccggttcgaccgggtcggtgctgtcgctgagtgcaatcacgattgcccagaaactgaccaccacttcgctcacgcaatttgtgacgggtgacatggccaacgccacgggtgatctgttggctaacagcctgtcggggccggatgtgctcggctcgccgctgacggtgttgagtgtgctggtgaacggggtctacgtgattcccgggcagaccggggcgaaagtcgagggtgagcatggcacgctgaccgtgtttgccgatggcaaatacgtctacaccccgcatgccggcctgacgctggatgagattggccaggtggataaattcacctacaagctcaccacgccaaccgggcagtcagacaccgccgacctgtacatccgcatcgactcgccagaccgcgacctggtctgggacgacgccaacccgggtgcgcccgccactgaaggcgctggctttgccgccgcccacagtgcggtggaccaggcggcggacgacggtgccaacgttgacgcagaccaccacgatgccgtggcggtcgatgacaccgacttcacccatgtcgatgctggcacggggacggatgggttgctgtgggaaggtggcgatgcggccatcaacctcaccgacctgatcggcaaagtcagcggtgtgcacagcatcgacctgaatgacgtcagcgcggttgacctgaccctgagccttgaagacctggtgtccatcaccgggcctgagtcggatcgtttgatgatccagggcgacgaccaggacagcgtgcacctgaccggcgactggtcgagcggtgtgacccaggtagagaacggtctggagtacgtggtctacacgagccccgaagatcagacccatcagctgtgggtacaaagcggcatcaacgtggtgtaacgccacccccgacgaccgggccgtctggcccggttttcatcaccaacggtcgtgcagcaacagcgcgtgacggatgtgtgtcacgcgccgttgttgtccccatccggtttgacaacagtcaggtgaattgcagtgaggcataagagtttggccacccaactgtctgccgcagtattggcaggcgctctgatcgcgccagggattgagccggtcatggccacgtcgcttctggacgacgaagaacgcgtcaacatcatcagccccagcaacctgggcacgaatttaccgggagggccaacgggcgtcagcgcaccggtggcaccccaacgcaacatcccgaacaacctcgacctcacacgggccattcagttggccgtggaatggcacccggctattgccgaggcgatcgggcagctttaccaacaaaacgagaacgtgaacatcgcccgttccggctattacccgcaagtcagcggcggcttcaattcgggttacgacagcggcctgagcggcaatggccagagccgtgcgttttccttgtcggcctcgcagatgctctacgacttcggcaaggtttcaagttcggtggacagcgcgctggcacgggtcagtggcagccaggcggcgatcttgctgtcgattgaccaagtggcccgcgacacctcgttcgcgatgatcgaactgcaacgctcgcaacgtctggtgaccctggcccgtgagcaaatcgacggcatttcggcgattgccgagttggccaaaaaacgcagcgacatgggcgccagcacccgttccgacctgatccaggcacgctcgcgggttgaggcttccatggccacccagcagcaattcagcgcgcaattcaatcgctggcgcagtgccttgagcagcctgctcggcgcgcagtcgccagtgagcgtgtccggcgcgtttccctcctcgttggaaaagtcctgcgtgggcgtgatgcccgatgaagcggtcacccccacgttgctgatcgcccaggcccagcgtgtggatgcgttggcattgatcgcccaggcccgcgccgaggccttgccgaccgtatcgctggacccctcgatcacgcattacctggacaacaacgacgacagtaacctgcccggcggccgcgatcgcacccgctatggcgtgtttctcaatgtaaagatgccgctgtatcagggcggcgccatcaccgcgcgcaaatctgccgcacaacaggcactgcgttctgcggacgcggccaatgacgctgcgcgcctggccgttcgccaaggattgctggaggcacgggaccagatatccagcctctcccaacgtctttcgaccctggattttcgtgagcgcagcatctccgaaacccgcgacctgtaccgccagcagtacctcgaactgggcacgcggccgctgctcgacttgctcaacgccgagcaggaaatccaccaggcgcgcatggaccgcgaaaacaccgcggccgacttgcggcgcctgaatatcgactgcctgtacaacaccggcgggctgcgcacggcgttccatttggacaacagcaccctgcagggtgtggagattcggccatgaatgaagccgtgaaacttgatgatgacctgagtgcaattcagacgcctttcactgcaccgccagcgtttgattacgaggtgtggctggaggcgatacttgcggttgcccggcattatcgcctggagtgctcggcgcagagcgtgcgcttggcggcgcagtggaccgacagtgcgtcggtggaagaggtggtgcggcgcatggcgcgccaggccggtttgaattgtgtgatcgccgacttttctgcttcgaccttgatgcagcgccagttgccgttggtgctgcagttcgatgacggccaggtcggcgtgctgcaaaccctgggtgaagatgacactctcggcatcgcctacagcggcgatggcggtttgcaaagcctcctgggccgtcgcgagttgctggagcaggcgcgcaaggttgtgatcctgcggcccatgggcgcggtgcgcgacacgcgggtcgacgactacatcaagccgtatcaaaagaactggttcagcagcatcgtgctgcgtgacctgcggccctacggctacgtgatgcttgcctcattggtgaccagcgtgctcggcctggccggggtgctgttttcaatgcaggtgtatgaccgcgtcattcccgcagaatccatgcccaccctgtacgtgctgttcggtggcgtgatgctggcgctggtcttcgatttcatcatgcgcattacgcgcgtgcgtatcaccgacatgctcggcaaacgcgccgacctgagggtgtcggacctggtgttcggtcacgcgattcgcctgcgcaacagtgcgcggcccaagtccaccgggtcgtttatttcccagctcaaggagctggagcaattgcgtgaactgatcacctccagcaccgcgacggcgttggcggacttgccgtttttcctgctgtttctggtgatctactggatgatcgccggcccgctggtggcggtgcccttggtggccgtgctgtttctggtggtgccgggcctgctggcgcaaaagaaactcgcggcgttggccagcgaatcgatgcgtgaagcctcgctgcgcagcgcaatgctggtggaaaccgtgcagggcctggacgacatcaaggcgctgcaagccgagcagcgctttcagcaacagtggaaccattacaacgcgacctgcggcgatgccagcctgcgtttgcgcatgctcaccaacaagctggtggcgtggagcaacaacgtgcagggttcggtgtttgccgtggtggtggtgttcggtgcaccgatggtcatggccagcgacatgaccaccggtagcctggtggccgcgtccatcctggcctcgcggatgatggcgccgatgtcgcagatcacccaggtgctgacccgttggcagcaggccaaggtggccctgcacagcctgaaccgcatcatggaattgccggtggaccacgccgaaggcagcaagcgtgtgcatctgccggtgctcaccgggcattacgtgctgaaccaggcggcattccaatattccgaggatgcgccagtgccggcactgcgtgtggcggatctgcagatacagcccggtgagcgcatcgccattctcggccgtaacggcgcgggcaagtccacgttgttgcaggcattggccgggatgcttgacctcaaggccggcagcatcagcctcgatggcgtcgccctcgggcatatcgaccccgcggacgtgcgccgtgacgtgggcctgatgacccagaactcgcggctgtttcacggcacgctgcgcgacaacctgatcatgggcgcgccccatgcgtcagacccggaaatactccaggccctggccctgaccggcgcggctgatttcatcggcaaatttgccgacggcatggaccacatgattctcgaaggcggcctcgggctttccggcgggcagcgccaatcgttgctgctgtcgcgcttgatcattcgccagccgcacatcgtgttgctcgacgaacccaccgcctccctcgatgaggccaccgagcgccaattgattcaacacctcgaccgctgggccgctggccgcacgctgatcatcgcgacgcaccgcatgagtgtgctgagcctggtgaaccgcatcatcgtggtcgacaacggccagatcatcgtcgatgacagcaaggacaacgcgattgcccggctgtccaaacccaaggggaaaacccagtgaaaacccaagcgccgaaaagaattgcgctgctcgccagcgaagacgaaggcaccgggcacggccatgagggggtggatgacagcacggtgctgcgctccacacgggtggtgctgtgggtgctggtcatgctgatggtgtttggcgtttgggcctatgtgtttgaagtggatgaagtgtccaccggcagcggcaaggtcattcccacgtcccgcgaacaaatcattcagtcgctcgaaggcggcatcgtcaccgagttgaatgtaggggagggcgatatcgtcaagcttgggcaaaccctggccaggcttgacccgaccaagactgaatccaacttcgatgaaagtgcctccaagtaccgtgcgtccctggccagcgtggcgcgcttgcaggcggaggtgagcggcaagccgttggtgttcccgccggagctggcgcgctatccggcgctgatcagcgcggaaaccgacctgttcaacacccggcgcaaaggcctggaggactcccaggccggcgtgcgttcttccctcgggttggtgcgcagtgaactggagatcaccgagaacctcgccaaggtcggcgcggccagcaatgtcgaggtgctgcgcctcaaacgccagaaagccgagctggagttgaagctgacccaagcgcgctccgattacatggtgcgggctggcgaggacctggccaaggtcaatgccgatgtcgagacgttgtcgtcggtgatgcgcgggcgttccgactcggtcacccgcctgaccctgcgttcgccggtacgcggaatcgtcaagggcatcgaggtcaccaccatcggcgggatcattccccccaacgggcgcttgatgcagattgtgccgctggatgagcagctgctgatcgaggcacgcatctcgccaagggacatcgccttcatccaccccgaccaggtcgccaaggtcaagatcaccgcctacgactacgcgatttatggcgggatggacggcaaggtggtgaccatttctcccgacaccattcaggacgaggtcaaacccgaggtgttctactatcgcgtgttcatccgcaccgatgccgacaccttgaaaaacaaggccggcaaggcgttttcgatcgtgccgggcatgatcgcctcggtggacatcaagaccggccagaagaccgtgctcgactacctgatcaagcccatgaaccgcgcgcgcgaggcactgcgcgagcgctaggggagggggcggcaatgggcaaagcgctcgtgttcgggttggccatggcctgtgcgttgtgggcgcaggctttcgatgacgctacggcgccactgccttggaacacccgcgccgacagggccacctgcaccgaacaggcctcggcgctgtgggtcgagttcgccgggggcactgcgtgtatgcgttacttcgccggcggcatccttgagcgtgcgcagacggtgatcgtgatgtttcatggcgaccgcacggccgagatgcatcgcgcgccggaggcgatcgcgggcaacaccctggccgctaaagtcgcccaggcccgggcgatgagcaaacgcgcggcggtgccggtggtcattgtggcccggcccggtacttatgggtccagcggcgaccacgggcaacggcgtcaggcgcaggaattcatggccctcaatggggcgctggatgaactgcgcgagcgttatggcatcgggcaattcgttttgctcggccacagcggcggggccacggccgccgccgcgctgctgaccctgggccgcaacgacgtgaaatgcgcggtgatgacctcgggagccttctcgctggtccagcgtgcgcagatgattcgccagagcaagggcctgccgtcaaagccagggcgtgataccaacgggttgctgcacccttatgacccggctcaacacatcgatggcatcgccgttgcgccgcaacggcagttgtttgtgatcggcagtgttgacgacaaggtcgcgccgtttgccctgcaggagggtttttatcaggcactcaggcgtgccgggcatcctgtgcagttgatcaaggcccagggcgtaccgagggcctttcatcaattgcgtaatgacattgggctgaagaccgccgcccgttgcgcggattaggccggtactgcctgttcgcgggtggccagttgctcacacaactgcgacagccccgtcccgcctgagcttttcaccatcacccaatccccggcctgaaaccactggcccgggtccttcgtcaatgcctgggtcagcgccttggcctgttcgaaccactgcaccgacagttcaccgcgcagtgccaggtacagcgcgtgcatcagagggccacaaagcaccacatgccgcggtgccacggcccgcagcgcgtcagccagttccaggtgatagtgctgggcgtcggcgccgagttcgagcatatcccccagtaccagcacgcggtgacgcggggcgatgggcaggtcggccatggcacgcagggctgcgctcatggagcccgggttggcgttgtaggcgtcattgatcagttgaaaatggccgtcggcgcatttgatcgacagggtattgccacgcccttcgaccggcatgaaggtacccaatgccgccaatgcttgctcggcctcaaggccggccgcagacagcgcagccagtaccgccagtgcgttgagcaccatgtgtcgcccgcgagcctgcaggctgaaatcaagcggtttgccggcgtagcgcgccttgacgatcacctggtttgcctcgctggtgcaatcgagcaaccgcaggtcggcctcggcgtgttcgccaaagctgatgacgtgcaaccgcgcggtttgagcggcttcggcgaacagcgcgtagtgcggcatgtcacggctgagcacggcatgcccgccgggggccatcgagcggaagatcgcgctttttttacgcgccaggttttccagggtgccgtgatattccagatgcgccggggcgatcccggtgaccacagcaatgtgcggcctgaccagttcggaattgattggcatgcggcccacagccatttccagtacccagaattttgccggctgggtcatgctcgccaggttccaggcaatgccatggggcaggttggcgttggcctcggtctggcccacgtcgccccaatgcttcaacgcgtgggccagcatcgcgaccacggtggttttgccgaagctgccggtcacgccgaatacctgcccggcaaaatgccgccgggcgtggcggcccatttgcagcatggcatcgctggtgtcggcgacttgcaagacgggcaggccgctgcccaggtagggcgtggggtctacgcacatgaatgcggacgggcggcgctcggcgctggcctgggcccagcgttgcgccgattgggcttcattggggccgaccttgctggggtggcgactgaggatgcgttgtggcttgaagaactgcatggagggcgtcaacccggtggcgtgccagccgttcggtggctggctggcccaggttcccagcgtcacttgggccagggtgtgggcgtcccaggtccggtccggggtggtttgcgtttcgaccctgcccacctggggcgcgccgtccagcaggtaacggtgataggcgatcagcccggaaaggtagtgctctacatcatcaatgcggacccggaacgcatgatggcggataaaaaaggccccggcgatgcgcgccgggttggcaaagtacatcgccagttccggccagaaatagccgttgagcaggtagcgggcgcgatggtgcaaggcgcagtagaacgcgtgcaggtcgatctcgttaagcaggtggcgcaactcgggttgcccggcgatgcgcgcaagcatctgttgcgcggccatcatcaattccagcaaggtcgggaacgtggtgatgcgttgctgcacaaagcccagatagccgacaacgttgttcaggccaaagcgaaaatacttttcgtcgggacggtagcgggtcagttcgttcacgcagtagctgagccagtggtcgtgctcgcgccaatgttctttttcgatgaaatagtcgaacgctttctccaccactgccagccagcgttcgttgccggtcaacccgtacaggcgcatcaggccgaaggcggcttcaccgtcgtagtagatgattcgaaacggcgctttgacgctcaggtcctgtgcatgcaaaacgtgcacaaaagcgccgctggcagggtcctgcatccaggccatgccgttggcgagcgcttcgagcagcggcaggtggtgacgagtaccggtggcttcgctgtacttgaccagcgccaacaggcacaccgcattgccgcccagtttgatctcattgccggtatcggtgagaaacgccgccacactgccatcggggagcaaatagggcttgatcagcacctgggtgagatgctccagcgagcggtcgatagccgccttcaagtgtgggtcgccggtcagcgcccaggcctcgatcatcgagtaggtggtgctggcatggcgcagggtgttgtaggtgttgatggcccggtcgaaacaagggaagtagccgtagatgaactgcccgctgtcttgcacctgtgtgctcaggtagcgggatgcgctgtcgatgcaggcccgcacggtgtcgggggcaagggtgcccagtgtgcgccagccggtctccagcccgttgccattcagtgcatgcgcctcgccatcttcggcgcagaacacacctgtggtgttgaaaacgaagacgcaggtttccggcgtcaggccagcgaggatgtcggcggtgggggttccggcaaaccggcgacgggcgtaagcggcgaagtttttcgggttgaaggtggcctgggcaatgtcgctgccgccatacaggatggcattggcgttcagctcctgttcggtgatggccaatcgcaggtcgctgtcgagggcgatgccttgcctgaagtaattgcgcttgtgacgtttgagccgctcattgagcttggcccaggtgatgggggtcacgttgaatgcccgttccacacgaatccagacacgctcggggtgacaggccccttgggaaatggcttggtcgtaccggcgttgcagttcaagggcacccgcttgccaggcgtgctcgaggctttgcgccgtaacatgaaaaacctgtgcacggtgtgtcgtgtcactcattgaaaaaaacaaagtgcagggttgtgaggcgtctgatgagacagaaaatccatgagtgtctttactcaaaagcgcatgacaagcaagtaattgctgtttcacaggtgcagatctccatgagtcaataacgtggcgacaggcgatgactacgtagagttataagggtatatccgcctaacgcaggccaagttatttgtgataaaggcactaaatccatttatatatcaagaatacaacgaggcctcctcctgggcgggttcgcgggcaggcgaagtggtttgactttcatagtgttgaagatgatcacgaatcagcttgcgaatgacctgagaaatagtaaggtcaacttcctcggacaacgactccagccgctgcttggtgggtgagtcgatgaggatggtcagacgcgttgttttatcaggcattttatttatccttttacagaaggcgcggtctcaactgccgcgtgcagtacgtactgaagtaggtgattaatccttagaaaaatccagtggagttgtaaccctgtgcgttggaagtctaattcaaatcactgagtgtttgccatggggcagcggggaaacttgcgagaatgtgaagttctgcacctttcgccaagccgcttattatcattccgttataatcctgtgaaactcggatattaatgaggtgtccagaaaattatacgaaacagtcggggctgtcaaaagccaatactatctattactaaagtagtgtttgtattgagtggtaagtgtgatcaggtagttttttgcatcatgacatgagtttttttcaagaagttactcttcacaatattctgtcacaaaatactaattgcttgtttcgagttgttgggggtgatcttcagaagttgcaacgtaaatgcgggggtttttgtcgctgggtgcaaaagcgatgtacagcgcagtggcaggttctgatcaaaaaggggccagggcgacccctcttgagtggcggtcaagcaaaaacgaaatatttgcgcacggtctctactacctcccacgtccccttcatccctggctccaccacaaaaatatccccggcgcgcaggtgaatcggctccaggccttccggggtgatgatgcagtagccttcctggaagtggcagtattcccacttcacgtagttcacgtaccacttgcccggtgtgcagatccaggtgcccatgatcttgctgccgtcttcactggtgtaggcgttgaggttgacggtgtgcgggtcaccttcgagtttttcccatttgcaggcatccaggaccggcaaagggtgggtgtcgcgcaatacggtgatgggttgggtcatgacggctccgaggcagggaatggaaagagccaccctaaggcctggtgcgttgcttcagtggtctgaactcgacatcgggatgcccagaagcgcagcggtgtgatgatccgcaaatcaccgcgtgcccttgtgggagccgggcttgcccgcgatagcggagtgtcaggctatgaaggtgcaagcagtgccatcgccatcgcgggcaagcccggctcccacataagagcgttgagcgatagatttgtgcatgaatcagccaattcctcgcattaagtgcgaaagttttccagaacggcgccagaattcgcaagaaaattcgcaaccggccctcgtatcattctccccagaacgagtgagagccttgaaatgaacccaataaaaacgtggtgggatatcagcccgcccttgagcacggcgacgccgacctggccgggcgatacgccgttccaggaagaacgcgtctggcagttcggcccggagtgtccggtgaacgtgggccgcgtgaccttctcgccgcacaccggcgcccacgtggatgcgccgctgcattacagcgcggatggcgcgccgatcggcgaggtgtcgctggatgtgtacatgggcacgtgccgcgtgttgcattgcctgggcagcggcgcactggtgcaaccccatcagcttgagggacgtgtggataacttgcccgagcgtgtgctgctgcgcacttatgcacaggcgccgctcaccgaatgggattcgagctttaccgccatcgcgccgcaaaccattgagttgctcgccagcctgggcgtgcgcttgatcggcgtcgacacgccgtcgctggacccgcaacagtccaagaccatggatgcccacacggcggtggcccgccaaggcatggcgattctcgaaggcatcgtgctcgatgacgtacccgagggcgactacgaactgatcgcgctgccgttgcgctttgccaacctggacgcgagcccggtgcgcgccattctccgcccgctcaaggagcccacgcgatgagccagtgtcccttctctgccggctaccaacccccggaagaatggcataacgccgaactgaatttctccgagtccatgagctacggtgactacctggacctgggcaaagtgctgagcgcccagcacccgctgtcgccggaccacaacgaaatgctcttcatcatccagcaccagacgtccgagctgtggatgaaactgatgctccacgaactcaaggctgcccgcgaacacgtgcgcctgagcgagttgccgccggcgttcaagatgctgacgcgggtgtcgcgcatcttcgaccaactggtgcacgcctgggcggtgctcgcgaccatgacgccgtcggaatacaaggcgattcgcccgttcctggggcagtcgtcggggtttcagtcgttccagtaccgcgagatcgaattcatcctcggcaacaagagcgcggcgctgctgcgaccccacgcccatcggccggagctgttgaacgagttgaaagtggcgattgccacgccgtcgctgtatgacgaggcgatcaacctgatggccaaggcgggcctgacgattgaccccaagcgtgccgagcgcgatccgacggcggccacggttcatgatgagtccgtggaggcggcatggcgggaggtgtatcgcgacccgcgccggtattgggatttgtatcagttggccgagaagtttatcgacctggaagattcgttccgccagtggcgctttcggcacgtgaccacggtggagcggattatcggtttccagccgggcaccggtggcacggaaggcgtgggctatttgcgcaagatgctcgacacggtgttgttccccgaactgtggcgagtacgctccacgctgtaaacaaaaagccccgggttaccggggcttttcatttggaatgcgatcaactgtgggagctggcttgttgtggcgagggagcttgctcccgctggagtgcgtagcgctcccatcttttcggggccgcttcgctgcccagcgggagcaagctccctcgccacacaagcccggctcccacagggatcactgtgcgttcactaccgcgttgcttttgcgaacccgcaaccgataggccacatagataatccccacccacaccggcatcgcgtacaccgactcgctgatccccggaatcgccagcatcacgctcacgatcattaccatgaacgccaggcacaggtagttgctgaacgggaaccaaaaggttttgaacgacggcgtcacgccttgcacgcccatggccttgcggaacttgatatgggtgatgctgatcagcgcccagttgatcatcagcgaggcaaccaccagcgcgaacagcagttccagcgcactttgcggcgcgacgtaattgaccaccacgcacaacatcgtcaccagcgccgaaatcgccagggcgcggatcggcacgccttgcttgttcagcttcatcagtgccttgggcgcatcaccttgctcggccaggccgaacagcatgcggctgttgcagtacacgccgctgttgtacaccgacagcgctgcggtcagcaccacgaagttgaggatgtgggcggcggtgtcgttgccgatcagcgagaagatctgcacaaacgggctgccactgtaggcatcgcccgaggccccgagggtttgcagcaattggtcccaagggtacagcgacagcagcacggtcagggcgccgacgtagaaaatcaggatccggtacaccacctggttgatggctttggggatcaccttgcgcggctcgctggcttcggcggcagtgatgcccaccagctccaggccgccgaacgagaacatgatgaacgccatggacatcaacagccccatgccgccattggggaagaacccgccgtggctccacaggttgctgaccgaggcttgcgggccgccggtgccgctgaacagcaggtagcagccgagcacgatcatgccgacaatcgccaccaccttgatgatcgcgaaccagaactcggcttcaccgaagaacttcacgttcagggtgttgatcaggttcaccgcgacaaagaacaccagtgcgctgacccacgtcggaatctccggccaccagaactggatgtatttgcccaccgccgtcagttcggccatgcccaccagtacgtagagcacccagtagttccagccggccaggaagcccgcgtagccgccccagtatttgtgcgcgaagtggctgaaggagcccgccacgggttcctcgacgatcatttcgccgagctggcgcatgatcaggaacgcgataaacccggcaatcgcgtagccgaggatcatcgacggccccgccgacttgagcaccccggccgagccgaggaacaaccctgtgccgatcgcccctcccaaggcgatcagctgaatgtgccggtttttcaggccacgcttgaggcccaccgggttaaccatgtcatccgccattaacagtcccttctacttgtttttctcagggtgaatgcacgccgcacccgcccctcaaaacgtctgaggggtcagatattactctgcgtgaacttttcgtaatacagctgaacgccatcaagtgcctgatctgccagccattgccggacggattcgaccattggaggggggccgcacaggtacatatctgccgatctgtcccgcaattcggccaggtcgaaatgctcggtgaggtagccgcgtttgccggcccactcgggggagggcgcgctgagcacttcggtgtagcgaaagtcagggattttcgctgcataggcggcaatgcgactggcctcgcacaaatcctcggcgccacgtacgccgtagtacaggtgcacgggttggttgcagccgttggcggccagctcatcgagcatgccgagcaaggccgacagcccggtgccaccggccaccagcaccagtggtcgggtgacgtggcgcaggtaaaacgcgcccaacggcgcctctatcaaaagctcgtcgccgacctggcagcgctcgcgcaggtaattgctcatcacgccatcgggcaacaggcgtaccaggaactgcaattgttggccgggaagattggcgaaggaatacgaacgccagctgtcggtgtcgggtaccgacagacgggcatattggccgggcagaaagtccagcggccgctccacctgcacctgcaggatcgccgtgctggccgacacctgctggacctcgctgaccgtgccacgcacgtgtaccgggcctggcgcgttgcacaggctcgaatcaaaatcgaagtaaaacgcggcatcggagttgacccgcgtctggcaactgagcattttgcgttgctgcaggtcgaggctggagagggcttcttcgtctacataatcctgggtgtagtcgccggattcgcaacggccctggcaggtgccgcatacgccttcacggcaatcgagcgggatcttgatgccattgcgcagcgcggcatccagcaggatttcatttgagcccaccgggaaaaacagggtcttgccgtcggcgaagctgaaggccactttgtgattcatattccaagctccctcgccacaaggtgtggtttgccgggttagaggtgatagaaatccagcaccgagttgatggtgtcgttgagcagcacggcatgcttgcgggtgatcagccagctgtcgccctccggtttgaggctgtaagtcgcgtggccgtagaactgctccgacgtcgccagccgatagaacaacgtgtgccagttcagcttcacttccagcgttccatccgcctgctcggcaacccttacgttattgatcaagtgcaacgtgcgcggcattggcgtggccgacgcggccttgccggtgcgcaggcggaacacgcggtcttccaggcccgagcggttggcgtaatagatcagcgacatctcgcgcttggggtcgcgggtgtagacatgttccgagtcccattgcggcaggtggaactcactctgcgggtcgaacagctgcacatacgcgtcccagtcccgggcgtcgcacagcgcggacttgcggtagaagaactgctcgatccggtactgcaactgggcattcatcattccacctcccgcaagttcagggcttgtcggtcgaggcctttaagcagaaattgctgccagttacggtgctggttcacgtacagcccttcgtgggtaaattcggtgccggtcatcgccggttgaatgccgatggcttcgctgttcggtgtcgggccggtctcccagcgatggctgccgcgcgagatatcgctccagcgttccagccggccctggaacccgcgctgggcttcgcgaaattccaccaggtcatccggcgtgcccatgccggacacgttgaagaagtcttcgaattggcgaatacggttttcgcggtcggcgtccgactcgttcttcacccccaggcactggctgatgatctcggtcttgttccacgccaccgggcggatgatgcgcagttgcgagctgatctggtcgagaaagaacaggctcgggtagatgttcaggttgcgcaggcggtgcatcatccattcggccttttgctggccgtgctcttctaccaggcgcggcatgatggtggcgtagccggagcgcaccgtcgggttgggcatgtcgctgaacaacaggctgtggccattgttgaaggcgaaccagccgtcatcggtattcgcgtcaccggcgccgagtttgctgtagtccagcgtggtgccggagcctgtgccgttttcgctgttgacctgttggcggtgctgcacggtggccacgtagttgtagtggacggtgctgacgtgataaccgtccaggccgttttcgttttgcagcttccagttgccgtcgtaggtgtaggcggacttgcccggcagcacctcaagctcgccggtggcggactgggcgaccatcatgtcgaaaaacacgctggcgtcgccgaggaagtcttccaggctgtcggtgccgtgcacgtccaggctgatgaacacaaagcctttgtagctctcgatgcgtgcttttttcaggccgcgcgtggccttgtcgaaaccttccgggtattcccccggcgccttgaccttcaccagccggccatcgctcttgtagcaccaggcgtggaacgggcaggtgaaggtggactggttgcctttgccgacgcgggtgagcgtggtgccgcgatgctggcaggcgttgatcagcgcattgagttggccctcgccgtcgcgggtgatgatcatcggctggcgcccggcgcgcatcgtcacgaagtcatggttattcgccagctcgctttcgtggcaggcgtagatccagttcttttcgaagatcagctccatctccagatcgaacagttccggctcggtgaacatgtcccgcgcaatgcgaaacacttcatccacaggccgaaaatccagacagccttcgataaacgttttccactgctcgacgctttttgcaccactcatgggaggcaccttttatgacaggggctaatcggtgggccattaaaggcagcagggcagggcgcgggctatccgcttagtgggggaacccgggccacataattgggcagcaaatacccaccccggtgcggggtgcgctactgtcaggcaggccaaaaccgccaggttatccacatagtcggcggttgctatccacccggttgcaatccggccggcgtggcgtagaacttgctgttgaacaacaacgacgcgccgccagagcgcgcaaaccgcctgaccgccgtgggtgcaccctgatgagtagccatacacgcgaaatccatattcaacgcttcgacctggaaggcgcctgcagctggatgtccggcatctgcggcccgcaccggctggcgacgtccacgcccgagcgcctgcgctttcaccacagcgccaacgtgttcaagtcccgcgccaccaccctgggcgtgatcgaatacggcaccgacgtgaccatcggcattgaagacgccgagcacttcagcagctacagcctgagcttgccgttggtgggcgagcaggagttgagcaagggcggcgagcggctgagttccaaccgtgaccaaggcgtgatcctcgcacccaatgaacatcaggtgctggcgatttccggcgactgccgcaagttgcaagtggtgatcacgcgggcggcgatgagcgagtcgctggaggggctgctgcaacgccccatcgaggcaccgctgcgttttgagccggtgatggacgcagtggacggtgcttcggcgtcgtggtggcgcatggcgcggtatttcattgcagagctggagcacggcagcgagctgtacgagcaggccgcgtttacccgcgacctggaaagctcgctgatcaaggggttgatccttgcccagccgaataactattcagaagaattgcgcgacgtactcggcgtgaaactgccgcattacttgatccgtgcgcggcagttcattcacgagaacgcccgcgaagcggtgcatctggaagacctggaaaccgccgccggcgtgtcgcgtttcaagctgtttgatgcgtttcgcaagtattttgcgctgtcgcccatggcgtatttgaaaaagtaccggctgggggctgtgcgtcaggaaatgctggagcagggttctacccgcaccatctctgaaattgccctaggctggggctttacccatttggggcggttttcggcggagtatcgaaaactgtttgatgagaccccgagccagacactgcagcgcaagcgcctgcgcagtctctgaccacaatgaagatcaaaatgtgggagctggcttgcctgcgatagcggtgggccagccagcaaagatgccagctgatccaccgccatcgcaggcaagccagctcccacattggatagagggtggctttgaaatttcagatcagctcttccaccaactgcaaacaatgactgagccccggcgactggtcattcacccgtcggctcagaatgatcggcgaggtcgccgtgctctccacaatcggtgtgtagccaatatccgcccggtgcagcacctgcaccgatgccggcaccaacgtcacacccattcccgcgccgaccaacccgatggccgtctgcaactcgttggtccactgcgccaccctgaggctcaaaccgtgggcgtcaaacagcgcgatcacatggtcggcatagctggggcgcgggttgccggggtagagcacaatcggctcggcggccaattgggcgagggtggcgggggcgccgagcaacgggtggccggcgggcagcacggcgaccagtcggtcttccaccaacacgcgttggacgatggccggatcgtcgatgcgaatgcgcccgaaaccgacatcaatccgcccggccttgagcgcttcgacctgctgcaaagtggtcatttccgacaagcccagttccagttccagcgtttcatggttgcgcaaccgccgaatcagttccggcagcacgccgtacagggtcgacggcgcaaaccctatgcccagccaggtcttctcgccctggccgatgcgccgcgtgttgtcgcagaccttgcccaactgttcgagcagcacattgcagtggtcatagaaaaaccgtccggcttcggtcagccgcagtggccggccgcgctccagcaaaatcacgcccaactcgtcttccaattgctggatctgccggctcaatggcggctgggcgatgtgcaggcgttcggctgcgcgggtgaagttgagggtttcacccagcacctggaaatagcgcagatgacgcagttccatgacggctcctttcatacctttagggtatcgtgtgagacccattctatattggaagccctgaaaaatacggcacagaatcgacgcaaatctataaagaacccaacgggtatagccatgccgatttgcgccatcgagtcgatcgacacgatcatcgtcgacctccccaccctccgcccgcacaagctggcgatgcacaccatgcaaaaccagacgctggtgatcatccgcctgcggtgcgccgacggcattgaaggcatcggcgaagccaccaccatcggcggcctgagctacggcaatgaaagccctgacagcatcaaggtcaacatcgaccgccacttcgcgccgctgttgatcggccaggatgcgagcaacataaacgcggcgatggtgcgcctggagcgcagcattcgcggcaacacctttgccaaatccggtattgaaagcgccttgcttgatgcgctgggcaaacgcttgagcctgccggtcagcgaactgctcggcggccgcgtgcgcgatgccttgccggtggcctggaccctcgccagcggcgacactgagcaagacattgccgaggcgcaaaagatgctcgacctgcgccgccaccgcctcttcaaattgaagatcggcgccggcgaagttggccgcgacctggcccatgtgattgcgatcaaaaaagccctgggcgagcgcgccagtgtgcgcgtcgacgtcaaccaggcctgggatgaagccgtggcgctgcgcgcgtgcaaggtactcggtgacaacggcatcgacctgattgagcagcctatttcgcgcaacaaccgtggcggcatggcacggctcaacctgtcgagcccgacgccgatcatggccgatgaatccattgagtgtgtggaggacgccttcaacctggcccgcgaaggtgcggcctcggtgtttgcattgaagatcgccaagaacggtggcccgcgcgccgtgttgcgtacggcggcgattgccgaagcggcgggcatcggcctgtacggcggcaccatgctcgaaggcggcatcggcaccctggcctcggcgcatgcatttctcacgctgaacaaactggcgtggggcaccgagctgttcggcccgctgctgctgaccgaagacatcctcaccgagccgccgctttaccgcgatttcgagctgcatgtttccaccgcaccgggcctgggcctgagcattgatgaagagcgcctggcgttctttcgccgtgacaaacactaagaggcgcctgccatgttgttccacgtaaaaatgaccgtgaacctgccgctcgacatgaaccccgagcgtgcggcgggtttgaaagccgaagaaaaagccctcgcacaacgcctgcaacaggaaggcaaatggcgccacctgtggcgcatcgccgggcattacgccaactacagcgtgttcgacgtgggcagtgtgcaggaactgcatgacctgctgatgcaactgccgctgttcccctacatggccatcgaagtgaatgcgctgtgccgccacccttcgtcgatccatgaggacgaccgctgagtctgtttccactctaataacgacaagatgaggattgcaccatgtccatccggatttcccagactgcccacgcccagcgctttctcgaagaagccagcggcaacctcaacgacggcggcaacccgcgcgccaaagcgttgatttaccggatcctgcgggacacggtgaacatcatcgaagacctggaggtgaccccggaggagttctggaaggcggtcaactacctcaatgagctgggcaaaaaccaggaagccggcttgctcgccgccgggttggggctggagcattacctggatttgctgatggacgccgccgatgaagaagccggcaaatccggcggcacgccgcgcaccatcgagggcccgttgtatgtggccggggcgccgttaagccaatatgaagcgcggctggatgatggcacggacgctgcggtgccgctgttcatgcgcgggcaggtgcgcgacaccgatggcaagccgttggcgggggcgattgtggatgtgtggcaggccaataccggcggcacctattcgtggtttgacccggcgcaatccgcgttcaacttgcgccgtcgcatcgaaaccgacgcccagggcaactaccgctttcgcagcatcgtaccgtcgggctacggttgcccaccgacgggcccgacccagcaattgctggatcaactgggccgccacgggcagcggccggcgcatattcacttcttcatctcggcgccggggcatcggcacctgaccacgcagatcaacctgtcggatgacccgtatctgcatgatgattttgcctatgcgacgcgggatgaattgattgccgagattcgcttcagtgacgatccgcaattggcgcgggagtttggcgtggaagggcggctcgcgcagattgattttgactttgagttgcagcttggggctgcgccggtagagcaaaagcgcatgcagcgcgtgcgtgcccttgaagtctgataaaacacggtcaatgtgggagctggcttgcctgcgatagcatcaactcggtgtatctgatgcaccgaggtgtctgcatcgcaggcaagccagctcccacatttgaattgaggtgttgctgctatttgcgcaggaccaagtccaacacctcatcccgatccttgatcttctgcaacacaatctccgagcgtatatccaccacccccgccgtgcggttcaagtggttcacgatgaagtccgaaaagtgcttcaagttacgcgcctgcacccgcagcacatagttgctggcgccggtgatcacgtaggcactcgccacctcgggccagccttgcaccttcttgataaatgtctcgtgccagtcctccacgtcctggcgcagcgacaggtgcacgatggcttccagttcgatgcccagttgctctgcattcaacaccgcgcggtagccactgatgattccctcgctctccagcaggcgcaaacggcgcaggcaggcggagggcgacagcgcgactttttccgccagttcctggttgctgatacggccatcctgttgcaggaaatgcaggaggcgcaggtcggtggcgtcgagaatcatggttagaataaatccgcatgtttggaggttaaattcgaatttcctacagcttaattagcctgatgcccggcactttgcacgaaaattctttaaatcttcgttcattattggggccatcgtcactcataaaaagcaggatcgctcatgaccacccgcagccattgccaagccctcgacgcccaggacccgctggcgcctttgcgtcatcagttcgcgttgccgcaaggcgtgatctacctcgacggcaactccctcggcgcgcgcccgcttgcatcgttggcgcgggcgcagcaggtgatcagcgatgagtggggcaatggcttgatccgcagctggaacagcgccggctgggcggatctgtcccagcgcctgggcaatcgcctggcgccgctgatcggtgcgcgcgacggtgaagtggtgatcaccgacaccacctcgatcaacctgttcaaggtactcagcgccgcgttgagtgtgcagcgccaacgccagcccaagcgcaaggtgatcgtcagtgaggcaagcaactttcccaccgacctgtacatcgccgagggcctggccgaactgctgcaacaggggtattcgttgcgcctggtcaacagcccggacgagctgccgcaagcggtcgacaccgacgtggcggtggtgatgctcacccacgtcaactacaagacctgctatatgtacgacatgcaggcactcaccgccctgagccatgagtgcggcgccctgagtatctgggacctggcgcactcggcaggcgcggtgcccatcgacctgcacaaggccggtgccgactatgccatcggctgcacttacaaatacctcaacggcgggccgggctcccaggcgtttgtgtgggtcagcccggcgttggtggacgtggtgcgccagccgttgtcgggctggtttgggcacacccgccaatttgccatggagtccagttatgcgccgagcgcgggtatcgcgcggtacctgtgcggcacgcagccgatcacctcgctggccatggtcgaatgcggtttggaggtttttgcccagacggatatggccagtttgcgcacgaaatccctggcgttgaccgacctgtttatcgcgctggtcgaagcgcgctgcgccgcccacaaactggtattgatcaccccgcgtgaacacgcccggcggggcagccacgtgagctttgaacaccctgaagggtatgcggtgatccaggcgctgatcgcccgtggcgtgatcggcgattaccgcgagccgcggatcatgcggttcgggtttacgccgttgtacacaagcttcaccgaggtattcgacgccgtggaaatcctcggtgaaatcctcgacaacggcacgtgggaccagccgcaattcaaagtccgcaacagcgtcacctgaatgtaacgccagctcccacaggggttctgagtgattttccagactgtgcaatcacaataataaaggggcacaccacgtgaccacgccagacaccggctttgcagagattacccaccgtgaactgggcctgaggcgccagctcacttccggccagatgagcatgatcgccatcggtggcgccatcggcaccgggctgttcatgggcagtgcctatgccatcggctatgccgggcccagcgtgctggtgagctacgccatcggcgcgttgatcaccttgttgttgatgggctgcctggcggagatgacggtggcgcattccacctcgggctcatttggggcctacgccgagttctacatcagcccgctggccgggtttctggtgcgttatgcctactgggcggcgattgtgctggcggtgggcgccgaggtcacggcggtggcgatgtacatgaagtactggttcgcgaatgtgccggaatgggtgtggatcgtgtcgttttccagcgtgctgatcctgctcaatgcgatcagcgtgaagaccttcggcaatttcgaatactggttttccacgatcaagatcagcgccatcgttggtttcatcatccttgccgtttacgtggtgttcggctccggcaacccggagtacggcgtgcagaattacaccgcccacgacgggttttttccccatggcctgagcggcatgtggatcgcggtgatcgtgtcgatcttcagctacttgagcgtggagatgatcgcggtggccgccggtgaagccgccgacccggagcaagcagtgaaaaaagcctttcgcgcgaccatcgtacggctggtggtgttctacctgctgaccctggcactgatgctcgccatcgtgccgtggaaccaggccggccagacccaaagcccgtttgtcacagtgatgcagaccatcggcattcccggcgccacgggagtgatgaatttcgtgatcctgatcgcggcgctgtcggcgatgaacagccagctctacatcaccacgcgcatgatgttcagcctgtcgcgcgcggggtttgcgccaaaatccatgggcgcactgagcaagagcggcatcccgttgaacgcactgttgctgtccagctcggggattgccttggcgacgctgctcaacgtggtgtacccgcaaagctcgttcaccttgatgatggcgatctcgatgttcggcgcaatcttcacctggttcatgatcttcctgacgcatttcttcttccgccgctaccgcaagcgccatggcgggccgaagctgtcgttccagctgcgcctgtttccctacagtacactgctggggctggtgctgatgggcgcggtgatgattaccacctatttcaccgaggcgttcaggatgacgctggtattcggcgtaccgttcctgctgattttgtcagcggtgtattacgcgttcttccgcaagggcagggccaaggcgtcgaacaaggctttggcgtaacccggcagttgttcgaaggcgcgcgcgcacagcagcagctttcggcaagcccagtcttcgtgtaacggctgggctttgaaacgctgtttctgtggccagcggtccagtgccgcctggggcacaatccccaggcctgcgccgccagaaaccatgcgaatcaacccgtcaaacccctcggcgcggatgcgtgtttgcaggcggaaaccggcgtgcaaggcctgttcttcgaggtaagccgtcagggcgctgttggcggtcaggccgacgaagtcgtattgcaggctgtcgataaaactcccaccggtgaacggatgatccagcggcgcgatcagcaccagcgggtcgtcgcgaaagggcagggtttgcaggccttgggtgtccacagcgtcggagatgatgcccaggtccgccgtgccttggcgcaaggcttgggtgatgcgcaggctgggcagctcttgcaggtcgatatcgaggttggggtgttcgcgcaggaagccggcgagcaattccggcaggtattcgctgagcgccgtggtgttgcacagcaggcgcacctggcctttggcgccgctggcgtattcggcgaggtcctgttgcaggtgctcggcttgttgcagcagcaggcgcgcgtgccgggccagggccttgccggcgggggttggcgtgacacctcggcggttgcgttcaaggagctcaatgcccagcgaggcttccatcgcccggatgcgcgcactggcggcggccagggataagtggctgcgggccgcgccggcggtgatgttgccggtgtcgaggatgtgcaggtagaggcgcaggtcgatcaggtcaaagtgcatggctttgtttctcgggtgatatcactggccttatcgcgggcaagcccgctcccacatttggatgtgtgaatacattcaagtgtgggagctggcttgcctgcgatggcgatttcagcctcacacaaaacaagaggctgcctcagtatatggcgaatttcagacctcatctaaatcccccacaatccccccatgaataccttcctcgcgttctatcaagacatcggtcccgccctgactctgttggtcttcggcaccttcctgctcgccggtaccgtcaaaggtgtcatcggcctgggcttgccgactgtcgccatgggcatgctcggcctggctatgctgccggcgcaggctgcggccttgctgatcatcccgtccaccgtgaccaacctctggcaactggcattcggcggccacttgagcgcgttgatcaaacgcctgtggcccctgctgctactgatcttcctcggcaccgggctcggcacgctgtggctgggcatggacggcgggcattgggtggtgcgcgccttgggcggggcgttgttggtgtatgcgttgagcggtttgttcttgcccacgctcaaggtcaagcctgccaccgaacgttggctgggcccgttgtgtggcgtgatcaccggcgtgatcacctcggccaccggtgtgttcgtgattccggcggtgccgtatctgcaagccttgggtttgaaccgcgaccagttggtgcaggcgctggggctgtcgttcacggtttctaccctggcgctggccgctggtctggcctggcgcggcacgctgggcggtggcgaactcaatgcgtccgtactggcgctggttcccgcgttgctgggtatgtggctgggccaggcgctgcgccaacgcatcagcgcggtgctgttcaaacgggtgttttttgccggcatggcgctactgggtgggcatttgctggtgggcggttaaaccgctcggtgtaagctgcgctgacccgataaagaggacagcctgtgaaagcccgatccgatgagttacagatcttcgtcagcgtgattgagtgcggctcgatttccgccgccgcagagcaggccgggcagacgccgtcggcggtcagccgcaccttgtcgcgcctggaagccaagctcgataccacgctgatcaaccgcaccacgcggcgtatggacctgaccgaggagggcaagtatttcttcgagcaggccaaggtgatcctggcgcagatggacgacctcgaagagcgcctgtcgtcgcgtcagaaaaagccggccgggcgcctgcgcatcaacgctgccgtaccgttcatgctgcacgggatcgtgccgtacatcgccgagtttcgcagcctctacccgcagatccagttagagctgaacagcgatgacctgatcatcgacctgctggaacaaagtaccgacattgcaattcgcatcggcaccctggccgactcgaccctgcatgcacgcgccctcggcagcacgccgctgcatatccttgccagccccgaatacctcaagcaaaacggtacaccgacgacggtggccgagttggcggcgcacacgttgctcggctttacccacactgagaccctcaaccactggccgctgcgtcatgtggagggcgaccgctggctgatccagccaggcattgccgcctccagtggggaaaccgtgcggcatctggcgctggaagggcagggcatttgctgcttgtcgaacttcatgaccatcgccgacatagaggccgggcggctggtaccgattctggaggatttcaacagcggctatcgccagccgatccacgcggtgttctaccgcaactcgcaattggccctgcgcatccagtgtttcctggacttcattcaagccaagcttgtgcgctatgcctgctgattcgtgatcctcgcgcaagagtgatttgggcggtgggggcttattcggcgcagtacggggcttgatactgggcccatcacttacccacgcaggagagtcctccatgaacgtattcgttaccggcgccgctggctttatcggtggctccatcgccaccggcctggtcaaggctggccaccgcgtcactggcctggtgcgcagcgccgagcaggcggctgaaatgaccgcgctgggcattactccgattatcggcaccctggatgacgctgccgtgttgaccgagcaggcacacaaggctgacgcggtgatcaacgcggcgagcagcgaccatcgcgccgccgtggaaaccttgctggctgccttgaaaggctccaacaaacctttcctgcacaccagcggttcaagcatcgtcggtgacgcgtcgggcggtaaatccagcgacgttatctacttcgaagacaccctgcccgaaccgaccgtggacaaggctgcacgcgtggccatcgataacctgatcctcgcggccgccaacgacggcgtgaattcggcggtgatctgcaacaccctgatctacggccacagcctgggtgtgaagcgtgacagcgtgcaattgcctcgcttgctcaaacaggcgcgcaagagcggtgtggtgcgccatgtgggtaccgggcagaatatctggtccaacgtgcacattgaagacgtggtggcgctctatctgctggcgcttgagaagaatgtaccgggtactttctacttcgtggaaagcagtgaagcggcgtttatcgacatgaccaccgccattgccgaggcgctgaagctgggcaagccgcaggactggccgctggccgaggctgaagccgagtggggctatgaaatggccaactatggcctgggctccaacagccgggtgcggggcaagcatgcccgtgaactgctgggctgggcgccgaagcgtacgtcggtggtggagtggattcgcaacgagatggtgtgatgttcgcttaacaccgaggtgctgccatcgcaggcaagccagctcccacactgactgcattccaaagctggaactcggtcaaaggtgggagctggcttgcctgcgatgcagaccactcggtcccccagactagctccatccactgcaattccgtaccatcccccgccttatcccccgcattaccctggtaccccatgaacctcacccgtctgcgcgccgatgccctggccggcctcactacgtcttttgcgttgctccccgaatgcatcgcctttgcgctggtcgcccacctcaacccgttgatgggcctgtatggcgcgttcatcatttgcacgctgaccgcgctgttcggcgggcggccaggcatggtgtccggcgcggccggctcgatggcggtggtgatcgtcgcgctggtggtgcaacacggcgtcgaatacctgctggcgacggtgctgctgggcgggctgatcatgatggccttcggcgtgctgcgcctgggcaagctggtgcgcatggtgccgcacccggtgatgctcggcttcgtcaacggcttggcgatcatcattgccttggcccaactggagcatttcaaaagcggtgacttctggctctcgggcacgccgctgtatgtgatgaccgggctggttgtgctgaccatggccatcgtttacctgttgccgcgcctgacccgtgccgtgccgcccgcgctggtggcgatcctcggcgtcggcctggcggtgtacctgctcgggctgcccacgcgcacccttggcgacatggcgcacattgccggcggcctgccgaccttcgcgttgccgcaaatcccctggaacctggaaaccctcggcatcatcgcgccctacgcgttcctgatggcgatggtcggcctgctggaaaccctgttgaccctcaacctgaccgacgaaatcactgaaacccggggctacccggaccgcgaaagcgtggcgctgggcgcggcgaatatggtctcgggcctgttcggcggcatggggggctgcgcgatgatcgggcaaaccgtgatcaacctcagctccggcgggcgtgggcgtttctccggcgtgttggccggggtgatgatcttgttgtttattctgttcctgtcgccgctgatcgagcggattccgctggcagcgctggtgggggtgatgtttgtggtctcgcagcagaccttcgcctgggcctcgttgcgggtgatcaacaaggtgccgctcaatgacgtgttggtgattctggcggtgacggtgatcacggtgttcaccgacctggccacggcagtgttgtgcgggattgtgattgcggcgctgaatttcgcctggcagcaggcgcgtgaactctacgcggatgagtatctggaagccgacggcagcaagctgtatcgcctgcacggcaccttgttctttgcctcgaccacgccgtttttgaatcaattcgacccggccaacgacccggctcaggtgacgcttgattgccgccacctgagctttgtcgactattcagcgattgctgcgctgatgaccttgcgcgagcgctataccaaggccggcaagcatttgcgggtgctgcatttgtcggagcgctgcaagaaactgcttaaacgtgcccgcgtgcagcacgactgactgagcttttgtggttatggcccgacgaggtcttcgagttcctgggcgcgggtctgggtcatgtccagctggcagccggagccattgacctgatcgatggtgccgccggtggctgaacccgcgaagccgcagttggcgtcacggtatttgatccacaggcgctgtacgtcttgcagcttctgcttgcggtcgccttcctgggcggcgagggcggttttgtaggccttgttcaggcggtcgtcctgcaccttggcttccttggcgttgcaattgaccatgtcggccgtggtgttggcgccgtccatgcactttttcagcgccgggttatcggtggccgaggcagtgccgcagagggccagcagcagggcgccggcggcgaaagggacaagcagggtctggcgattcattgttggttttcctggttgtgaataggggccgccatgtgagactcggccccggcagttgagtttccgcgcgcaaaaaacttcatgtaagaacgccccccgaattttcatccgtggttgccgggcatatccgcaagcgacagtgcttgtctgtgggcgaaaattactttcattaaaattgaaaatactcaccggtaatgatttatgagtttcacaaccaactcgacgtgaccctttccgaggagtaccgcatggccgcatcaccgggcttcgggctattggcatacgctgccatcgccatcattgcattgatcgtgctgattgcacgttaccggcttaacccgtttatcgtcattaccctggtgtccatcggcctggcgctgatggccgggatgccggcagataccatcatggggtcctatgaggcgggtgtcggtaaaaccctggggcacatcgccctggtcgtggcgctgggcaccatgctgggcaagatgatggccgaatccggtggcgccgagcaggtggcgcgcacgctgatcaaccggtttggcgagcgcaatgcgcattgggcgatggtctgcatcgcatttctggtggggctgccgctgtttttcgaggtcggttttgtgttgctggtgccgatcgcctttaccgtggcgcggcgtgtaggcgtgtcgatcctgatggtcggcttgccgatggtcgccggcttgtcggtggtgcatgcgctggtgccgccgcacccagcagcgatgatggcggtgctggcgtataacgcgtcggtcggccagaccgtgctgtatgcgattctgatcggcattcccacggccatcatcgccggccccctgtatgccaaattcatcgtgccgcgcattcacctgccggcggaaaacccgctggaacgccagttcatcgaccgcgagccacgcacccgtttaccgagttttgccatgaccatgggcaccattctgttgccggtggtgctgatgatgatcggcggttgggccaatgtgatttccacaccgggcaccggctttaatcagtttttgctgtttatcggcaactcggtgatcgccttgctggtggcgaccctggtgagcttttataccctgggcctggcgcagggattcaaccgcgagtcgatcctcaaattcaccaacgaatgcctggcgccgaccgccagcatcacgttgctggtgggcgcgggtggcgggttgaaccgcattctggtggacgcgggcgtcacccatgaaattctcggcctggcccacgctttccacctgtcaccgctggtgatgggctggctgttcgccgcgttgatgcgcatcgccacgggttcggcgacggtggccatgaccacagcctccggcgtggttgcgccggtcgccatgggcctgggttatccacaccctgaattgctggtgctggccaccggcgcgggctcggtgatcttttcccacgtgaatgacggcggcttctggctgatcaaggaatacttcaatatgacggtgatccagaccttcaagacctggaccgtgttggagacgttgatctctgttgtcgcgttcggtctgacctatggtctgtcctgcattttgtaacccggagcctccatggacatcctctaccagatccgcgcccgccaggcttccttcagtgccggcgaagggcgcatcgccaagctgatgctggatgacgtgggctttgccgcgtcggccagcctggaggcgttgtcgcaacgggccgaggtcagtaccgccacgttgtcgcggttcgcacgcagcgtggggtgccgggatttgcgtgatttgcgcctgcaactggcgcaggccagcggcgtgggcagtcgctttctggaccctgcggggttgcccgaacagtcggcgtttcatcggcagattctcggcgatattgaagcgacgttgcgtcagcacttgtcggggttcaatcaaacacgttttgccgatgcagtcagcctgctgggcaaggcgcggatgatccatgcgttcggcatgggcggcccgtcgagcctgtgcagcgatgagttgcaggtgcgtctggtgcgcctgggttacccaattgccgccagccatgacccggtgatgatgcgcgtcacggcggcgaccctgggcccggagcatgcgctgatcgtctgctcgctcaccggcctcacgcctgaactgctggacgtggtgacgctggcccgcaactacgacgcgcgcatcatcgccatcaccctggccgattccccgttggccgagttggcggacgtcctactgccgctgcaaccggccgaaaccagttttatctacaagcccaccgcggcgcgctacggaatgctgctggccatcgacctgctcgccaccgagctggcgctggccctgccggacgacaaccaggaacgcctgcgacggatcaagctggctctggacgattatcgcggcggccccgacagcctgccgcttggagactgatatgaagtacgacacgctgattcgccaggcgctgatcattgatggcagcaacaccccggggtatgtggcggatgtggggcttctggccggacgcattgaaaccatcggtgacttggcgacggcgacggccgagtatgaagtcgacgccaacggccgcgtgctggcgccgggttttatcgacgtgcacacccacgacgatacggtggtgatccgtcatccgcagatgctgcccaagctcagccagggcgtgaccacggtcatcgtcggtaactgcggcatcagcgcttccccggtgagcttgcgcagcgatccgccagacccgatgaacctgctcggcaagcgtgaggcattcacttatccacggtttgccgactatcgcagcgccgtcgaagccgctcatccggccgtcaacgtcgcggccttgatcggccatacggcgctgcgcagcaaccatatggacgacctgcatcgcaccgccacaccggatgaaatcgccgccatgcgcgtgcaattgcaggagagccttgaggacggcgccctcggtttatccacaggcctggcctacgccagcgcgttcaatgccgagaccgacgaagtgttgcaactcagtgaggaactgacggccttcggcgcggtgtacaccacccatttgcgcagtgagttcgagccggtgctggaggcgatggacgaggcgtttttgattggccggcatgccaaagcgccggtgattatttcccacctcaagtgcgcgggggcggggaactgggggcgcagtccgcagctgttggcgtcgttggaattggctgcgaaaacccatccggtggggtgtgattgttacccctacgcggcgagttcttcgacgctggatttgaagcaggtgaccgacgcgtttcgcatcaccattacctggtccactccacacccgcaagtgggcgggcgtgacttgcaggatattgctgccgagtgggacgtttcgctgctggacgcagcgcgtcgcctgcaaccggcgggagcggtgtattacggcatggatgaagcggatgtgcggcgcattctggcgcatccgctgtcgatggtgggctcggacgggttgccggaagacccgtttccacacccgcgtttgtggggcgctttcccgcgggtgctggggcatttcagccgggatgtgggcttgttcccgctgcataccgccgtgcacaaaatgacagggttatcggctgcccgttttggcctggccgagcgcggcgaaattcgtgaagggcactgggccgacctggtgttgttcgacccgctgcttgtgcgcgatgtggcagacttcaaagaaccgcaacgcgcggcagaaggcatcgacggggtgtgggtcaacggtgtattgagttaccgcgacgggcaggcgaacggtcaacgccctggccggttcctggcgcgcagtggggatttgcgtcgtggattcgtggctggacggtagaccgggttatcgttcatcgcaggcaagccagctcccacagttgactgcattccaacgttggaactcgatcaacagtaggagctggcttgcctgcgattgcgatctgtcattcagcacgggaaaccctctatagttgcggttttcaggcaaggaggcggctacatgaacttgggtaaagttacccccattctgcggattttcgacgaagccaaagcgctggaattctacgtcgacttcctggggttcaaggtggattggcagcaccgcttcgaggcgaattttccgttgtacctgcaggtgtcgctgggtgagtgcgtgctgcatttatccgagcaccatggcgatgcgtcgccgggttcggcggtgcggattcaggcgcagggcgtggacgcctatcagcaacaattgctgggcaaggattaccgttacgccaagcccggggttgaagaaacgccctggggctcgcgggagatgagtatcagcgatccgtttgggaatcggctggtgtttgttgaggaaagcgagggctgaagggtaaatcgcgggcaataaaaaaccgccttagtagggcggttttttattgcaaacccagttagtggctggggttgctctctcaaaggacgcaatcgacccgcaggccgatactacctctggtcattccatcacgcaaggcacggcgatgtccggtaagaatcgcgttctgacatttttctctcgtctggctttactgtaaaagcttgcaataaatctatctgcgatactggatatttgaccactgcttgacacacctttgacgaggatgttcgttaggatcatcccccgttctgcgtttgtcgcttttggggtgagccgggtatgcgcgcgaattctggaccgatcgccacgggctagtaatccgtgccggattgatgcgggaggatcattagcccggccgcctcaaaggacgcaatcgactcgcgtccgaaggcccacgtgttccggtaagtgcgctggaggtaaggcccaactcacggagggccgagtatgtccaagtttgcacgacatatgtggaacctcgtagtgaatgcctcgcgtgcttatcacgtgtggatattcctgcgggacagcttcgatgacctgtaaggtctgaaaagtggagccgcctcggtttaggccgaggcggctttttttacacccggaaatgactgaccatctgctgcaactggctacccagccgcgccagttccacactcgacttggccgtctcgtcgctcgctgttgcggtctgctccgacacatcgcgtacgttcacgatgctgcggctgatctcttccgccacggcactttgctgctcggccgctgcggcaatctgttggttcatcgactgaatgttcgacaccgtgcgggtaatgttttccagtgacacaccggccttgcgcgtcagttccacactgctgtcggtgaggctgcggctgttgttcatcaccgcggccacttgctgtgtaccgttctgcaaaccggcgaccaggccttcgatttcttcggtggatttctgcgtgcgctgggccaggccacgcacttcgtccgccaccacggcaaacccgcggccggcttcaccggcacgtgccgcttcgatcgcggcgttgagtgccagcaggttggtctgttcggccacggccttgatcacatccatcacgctgccgatcttgttgctctcttgttgcaagtgcgtcatggcgtcggtagaacgcgccacttcggcggccaggcgttcgatttgggcgatggcttcggccaccactttgtcgcctgcgcgggcttggccatcggcatcggcagcggccagggacgcttgctcggcgttgcgcgccacttcctgcacggtggcggtcatctcatgcatcgcggtggcaacctgatcggtctcgatcttctggctgttcacgccggcactggtctgctcggtcacggctgaaagctcttcggcagcgctggcgatttgcgtcacgccgtcgcgaatgccgctgatcaactcacgcagggtggtgcccatgcgctggataccttgttgcaacacgcccagttcgtcacgacgagtgatctgaatgttgtggctcagatcgcccgaggcaatgcgctccaccacggccagggtatcctggatcgggcgagtgatctggcgtgtgatgaccagtgcggcgatgacgcccaccagcaatgccagcagcgtgctgatcaattgcaggctgcgggcctgggcgctttcggcgtcgcggcggtccagctggatatcgtagagtttgtcgctgatggtgacgatatcgccgccctgggtggtcatttcagcgcgggcggtgacgatgttggcgttcgccgccttgtagctctgcacggcgctgcgataggcgccgagtgcggtttccagcgaagccaatgcgctttgctgactgctgccgaacgcggtgttgaggcttttcaggctaccgatggctttctcgatctgcgcagcggcgcgggcttcggtttcggtgttgacgttgttggtgtagccgcgcacttcgtatcgggccagttggaaatcttctttggcgttgctcacggcctggtactgggtgaaacgctccgggctgtcggccatctgttgcacgcctgtttccagcgcgttgatctgtgtgttggcgatatcggccttgtcgcccatcacttggcgtgcgctggcgccattgcggtaggcctcgcgcattttgttcagggactgctgataggcggtgatgaccgctttctgctcgttgagcagcttgaggttttccgggctcttgaaggtgtcgagcagcttctgttgctgggcggcgaaggcgtcgaggctggtctgaacgttctgggccacggcttcgtcgccattggccagcatgtattgcaggcgcacgatgcgcagtttggtcagcgaggcattgagctgagtgatgtcgctcatccagttgctgcggtcgatcaggcctcccaggctggtccagccggtgagggccaggattgaggtgaggaccaataccaggccgaagcccaggccgagtttgaggttgacgctgatgttaccgaaccagctgttcatcgaatgctccctgaaggtgatgtttgtctgctggacggtgttgttgtttgagccagccaaagtatgtaggtcggtatcggcggcaagaggtgattctgaaattatttttaggtgggctgatgaacggcggcccccgcccgattgccgggcgaggtgctcaggctttggttgtcaggttatttgccgaagcccaaggccctgaggagggcgggccttgagcacttcgatcaggacggtcagatcatagaagcgctcatttttgagtgcgtcccagcgttcgatgaaatagtggcctttatcatcgatctgaatcggggtggtgatgatttcattgctgcgggagcggtggaccaggctgacctcgaattcactggggtactcgatgaagaagtgacccgcttcggtgagccgtgtacggtcgggcagcggcgcacgtcgcggctctggctgtttgaggttacccacatcaaccctgaagtcactgcgcagggcgacaatcgagtgttctccgacggattgccaaccgccggtgcgcaaccttttggcctgtgccgggaaggtatcgcgcagatgcaggctgaccgcatcctgcaactggacaatgcccggcactccccggtgcatgtcggtatgggtattgcccatgaaggccacccatttatgggcgccctcggcgagctgatcggccttgatcacttcattggcaaaatagttgaataactctccccggcccatgtcgccgatgatgcctttgacgtgatagctggcggtgcagtccagtgccctgactcggatcccgtatttattggcagttttgaccacgttggtaaacgtgtgggcgcctgtgtactccggcatttgtcccgcatcgagggctttgaggtagtttttcaagctcgggggcatttttgccgtgcggtaaaaggtctccagtgcggcctgatgcaggtcggtgagcaagtgttccatgtacaacgtcttcaccccctgttttttcagccgttttatatggtcgatcaagaactgcttggcggactgttggatgtggctttcgccgatgaccaagccggttttttgccgatacaactgctcgataaatacctgctcgctctgtgtcgagagttgagtcagcggtgcgcgcggggctggcgtgaagtcggcaaacgcggtttctgcggcgctcgccaagcgttgtcgtatgtcgctgaattgctgctgtgcagcaacatgatcggggttggctgatacatagtgggtatccagcccgaagcggctgtgtttgatttcatctataggtgcgtgaatcgcgaggggcaggtcgaactcggcaaaatgtgtggccgccacaggcggggtcgccgaggtcatcggtgcgggaatcgtcgagggtgttgcgggcatcgtcaacgcgtaatcccctcgggacagacctcgtgcggtgctgtcgggccacacaccggttggctgcccgggggctgcgctctgcacacgcaaggcgagggtgttttgcaggtccgccaggcccgggacccgttcatagctgcccagccggtcggcgctcaccagcgccacccagccttccccgggtttttcgctcaggttgtgttcaatcagggtgtgggaataaaagttgcgcagtttgctgctgcgtggggtgaagcgcgagctgtcgagcaggcttgccactggttcgagatgataggaaacggaaccgtccagcccatcaatttcgacatttaggcgctgggtttcatccagcaattttctgtaggtgaaggctgcgtctttcgacaaccccaggttgtcatccgccaagtccagctggcgcttgagtattctcagtgcgagggctttgtctccagggcgtttgttactcaaggttttcagtttgctctggaacaggtcgcgtggcaggtgctcgatgtagacgcgtgtgagcccttgctcaaccagcgtcggcagttcttcgatcaagagttgcaagctggcggtcggatttctggcggcaccgatgatcaagcgtttatcacggccgaacagcgttttcacgatatcgctgtgagccgcgttggcggccagcacgggggcgggtgctttcggggttggggtaggcagggcctggaaaaacgtgtcggcgcgttggatcaattgcgcaacccttgttgaataggcgtcgcgcagaaacgatgttccggcctgaaaattgtaaaggatggtttccgatgctcccaactccatgccagggaggttgtccttgaatgttgggtcgagcatgtcgcgcagcagcgtggcgtcatcgcctgtcaggtcgaagttgtccagtgggctgctctgctcgtttatcaatgattcatagccgttggtgcctccacgtaaggtcgggcgtacccagcggtcgccttcgcgtttgacctggcgtgcggtcgaatgaaattcgccggtgcccgcgtccaggcgatacagcacgtagatgttctcggagttgggcgttttggtggtccacaacctccgcccgttgaataacgcaggctgcatgttttcgggggtgagcgtgtcgagcctgccgatcactgcactttgagccgcgtgtgggcgcggtttgatcattggccgcagcgaactcaaggcgcttttcagagcaggacgaacatcaaacagcacggcgccgccgaaattggccaggtaaccgatgtagtgctccagcgcgccgcccttgtcgttttggtagtaggcattcagcgcgagcatggcgtccttgaaggccagcaacccgccaagggtcaggctgagcagggggaacggcatggtggcgacggccgtcacccattcgatgcaggtccacagaatgccggtgatcatctgggtgcgattgacggtggtgccttgtacatcgtcgatcttgcgctgcaggctcatgttgtagaactcatggcgcaaatcactgagcggcgaaatatggtttgtcccgtcgtatcgtggagggctcggtgtggtgcggtcgatagcctgcggcaggccgttttttgcgttgtgtaaaaacaccccgatacgagccattgacgtcagcggtacccgcgcgcgccagtaaccgagcatgccgtcgacgtgtttgagcaggtaattgaatagccttgcttcacgaaaggcgatgccatccggcgcatccggggtgtacaacagcaccgggttgtcggcatggctgaacaggtaattaccgatgacccaatcgccattgataaataaccggtggactttgtaagtgttgcgtacgcggatggtggtatccgtcaggctgtcgatagcccgttccagccaggccaggtcgatgcttgcgatatgcccttgcagccgtgactccaatgcggcgcttttcatctgcaattgctgaatcgccagcactgcgttgcgacgctcgtcgtactgggggctgttgctgttttgcaagcgccggcgcacttcgtcggtgtagcgttcgccaacccatacgcctctcaccgagcgctcgactttctcggcggtcagtgcgctcaagtcgacaccgggagggcctcgaaacgtggcggagcgggaaaatttctcgttgagaaacccaatgctgtcgtcgtacccgtcgcggtacagcgtggtataggagaccggcttgtccccatcgccgagcaagggctggggggagtaggcgaaaatactgtcagggtcgatgtcattctgagtgcggcccagcaattgattcaggctgcgtttggccttttcgtgcaggtagatttcgaaggtcgggaaactggcttccgaatccagccttgcgttataggcgtgcagtgcgcccgcggcgtcttctgccagggtggtgaggcgcgtgcggtcagccgctgaggcggatcggtaccaagccggcgcgcccaactcgtagtcgtccagcaacagtgccaggcggtgcgccgccatggcatccaggcagtcggtatggttgcagggtttaccgaaggtcactttcaggtgttcctcggcgccaggtttgaagccgatgccctggataacagcgctcatcgatgggcggaagcgcaaaggcacttgctccagcacgtagccggccattgagcggttatctgtctgaggtttgtcactcagccagccgaggatgtgggtctggcattcgcgctctgtgttgaagctataaaactgctgcgcgctgggtgcatcgggtgtacacagcaacaggcgtttaatttgaccgcttgcatcatcttcgcgcaacagccataggtctttgagctgggcgccgtggaacatcacggtttgcgcgcagagcccgggcgcggggtgtctcgcaattgctcaaacagctggaagtcggcttggctcagatggccttgcagcttggcgagataagccatggccaccaggcgctgatcgaaaaaactgcgcgcggcgtgtttgatctgcggggtgcccaaggcgtttttctggatgttggcaaattccaggcgcggttgcaggctttgcagcggggtgatcagtttttgcggtgtgatccaggcaagcgtttcgcccagcggggcgccggcgtagctgagggtgctgtgttcgaggaaggccgagccgggggcgacgtcacctgtgtgcaggccgcgcagcgtgagttccaccagtgagcgttgctgaacgtaggtgcctgcttgagccaccgtgcggcgagtggtgatgtgcagtttgtccggatccaggtcgtggatgtcccactgataggccaggtactcggcccattgatagcgggcgagggcatggggggatgaagcggggccgatcaggtccatgaacgactgacgggcgcggttataactgagcaggtgcaggtcaagcctctcgcgttggttgtcgccggcgctgcggtaccagtccggaagggcgtgatagagatcacgttccagcaactgttgtgccctgaggtccaggcgcgaggtcaggtccggcagggcggcgttgacggcgttgtccagatgctgttggagctgtgcggcgctgagctggccgtcttcggcgaggctcagggcgaagtcgatgtcttgtgtgcgcttgtcgagcaaggcttgataggtgcattcgaacagcggttcgccctcgatgggctgcaggttcagcgggaagatctcaagggtatcgagatgctgataccgcacgggcaaatggtgattgaactctgcccgtccggcatgcgtcgccatcgccgactgtaagccctggtccagttcattcagcgagtcgaaggcttccagaccacgagaaggcgtgaataacagcactggccccacggggtcggtgctgctcaggctgtcgacgaccgggctggatttgcgcgtcagcacaaaggctccggcgaatgtcacggtctgttcctgatagctgaaagtgagtgcgtacagacctgggcgaaagccaggcccgcgggaacaatcttcaagcatcagcaggtcggcgggggatagcaaatagtcactgacgttgagccgagcctcgtgttccagggcgctgatgccggcggtgaatgtcaggtaggtcttgcggctttggccatcgacggtgctcgtttcatcctgggtctgcaggtttgtgttcaggccggattgcaattgactcagtttttgttggccggctgcctgggtgaggtccacctggttgaggtcttgatacagaccgcgagcctgagcctggaatgtgccgttgatgcgctttaaggtggcgtttgtgtgttccagcgtcacgcgctccttcggcaggacaacaggctgccggctgtaggcgcgcagcgtcgggtcgatctccagcaagtgggtgtggatctgttgcagcgtgggtgtggatgcaagggtgttcggcgtactcattggcacagccccgggagtggtgagttgaatcaccagcatggagactgaagccgcgtgctcggcagtagataggtatgcgccggtgctcatcaacgcccggtgttgtgtgctagtctgctggcccttttagttctggagggtacgcaaagggcagcacttgtgcggctttttgaatgccttcctacagcggagcaccttcatgtccgacgttaatctgtctaccgacgaaacccgcgtcagctacggtattggtcgtcaactgggcgaccaactgcgcgacaacccgccaccgggcgtaagcatcgacgcgatcctggcgggcctgaccgacgccttcgccggcaagccaagccgtgttgaccaggagcaaatggctgccagcttcaaggttatccgcgaaatcatgcaagccgaagcggctgccaaggctgaagccgctgctggcgaaggcctggccttcctggctgaaaatgccaagcgcgatggcatcaccactctggcttccggcctgcaatttgaagtgctgacggccggtgacggcgccaagccaacccgtgaagaccaggtgcgtacccactaccacggcaccctgatcgacggcactgtgttcgacagctcctacgagcgcggccagcctgcagaattcccggttggcggcgtgatcgccggctggactgaagccctgcaactgatgaatgccggcagcaaatggcgcctgtacgtaccgagcgaactggcttacggcgctcaaggcgttggcagcatcccgccgcacagcgttctggtattcgacgtcgagctgctcgacgttctgtaagacccggaagcattgacaccggctttatgtgggagctggcttgcctgcgatagcatcacctcggtagcaggtttgaccgagttgcctgcatcgcaggcaagccagctcccacacaaggccggcgcattcaggctcgctcatggatgaaacttgccattaagctccgtcgccgggcgcaacgctcgggcatagcagaacagaaacaagttacgcaccacttccttcagcactccaggttcgctggaactcaggccgttgacgtccaggtcgccctgatcctgcagttcattcagcgcttcttcttccagtactgcacagacctcaccggtttcccgatgcaggattcgcaggtaagggtgtgggcggtccagccaggcatctatcaaatacgtcatggttcattctccttgatgggtttcaatgagaataattcttattcgtggaatagcaagtgcctattggcagtttcctgagttttctgtgtggatattgcgttcgatcaaaggagagggcgaaacgccatcccgcgacgggcgcgggatggaggcagcaggttcagactttgcgcacgaactcggacttgagtttcatcgggccgataccgtcgatcttgcaatcgatatcgtggtcgccgtcgcacaggcggatgttcttgaccttggttccgaccttcactacgagcgaagtgcccttgaccttgagatctttgatcacggtgatggtgtcgccgtcttgcaggacgttgcccacagaatctttctttacggtttcatcgccggttgcttcggcctcggcattggcggaccactcgtgggcgcattccgggcagatcagctgggcgccgtcttcgtaagtgaattcggaattgcatttcgggcagggtggcaacgtgctcactaaggctccttgaaagtcagggatggctaaagggcgcacattatatagggttttggcggtgggcggggttggagtcggtctagtgtgggagctggcttgcctgcgatagcagtagtgaattcactccagtcatcgcaggcaagccagctcccacattaatcagtgcggaatcagtgagtgcgcgcgaccgcaaactcactcagctcgaccagggcgtcccggtattcgctggcggggagggcttcgagacactggatggcacgggccacgtagtcacgcgccagttgcgcggtgtaatccagcgagcccgacgcttccacggcggcacggatggcctccaggtcttcgatcccgcctttctggatcgctttacgcaccaatgcagcctgttccggcgtaccttcgcgcatggtgtagatcagtggcagggtcggcttgccttcggccaggtcgtcaccgacgtttttacccaaggtctcggcgtcgcccttgtagtcgagcaggtcgtccaccagttggaaggccacgcccagatggtcgccgaacgtgcgcagggcctcgcgttgctcaggcgacgcttcgcacagggctgcggcgctgtgggtcgaagcttcgaagagcatcgcggttttgccgcgaatcacttccatgtaggtttcttcggtggtgctggcgtcgcgaaccttcgacagctgcaacacttcgccttcggcgatgatgcgggtggcttgtgaaagaatcttcatcaccggcatcgagcccagttcgaccatcatttcgaacgagcgcgagtacaggaagtcgccgaccagtacgctaggggcgttgccccacatggcgttggcagtctcgcggccacggcgcatgccggacatgtcgaccacgtcgtcatgcagcagggtggcggtgtgcaggaactcgatggtggcggcgagcaggcgcaggtcatcgccttcgcggcccagggccttgccacacagcaacactaataaaggacgcaggcgtttgcctccggccgacgtaatgtagtcgccaattttggagaccagcggcactttagaagtcagctgcttcttgatgatgacgtcgacggcgctaaaatcgtccgcgaccgcgcggtagaaggcttggggttgcatcagcgacagtcgctccagaagggttgcgcggcatgctaggacccacgccctgcactgtcaaggcgcgatagacggccccttgcaaggcttctttaccttgcgtacaatcgcgcaccctgaacttcctgggcagcacctgccttacgcaattgcattcgggacgtccatcccatgcagccatgccagccaatacctcttcttataaagagctgggtgagcaggattatcggagaaataccatgtcgtacgcagtaattgttactggtggcaagcaatacaaggtcgccccaggtgaatacctgaagatcgagaaactggaaatcgctaccggcgaatccgttacctttgatcgcgttctgttggtcgccaatggcgatgacgtgaacatcggcgctccagttgttgctggcgctaccgttgtggctgaagtgatctcccaaggtcgtcacgataaagtccgcatcatcaagttccgtcgtcgtaagcaccacatgaagcgtatgggccaccgccagtggtacaccgagatcaaaatcaccggtattcaggcttaatttcagcctaattcctcactaggagaattgactcatggcacacaaaaaagctggtggtagtacccgtaacggtcgcgactcagaagccaaacgccttggcgtgaagatgtatggcggccagaaaatcattccgggcaacatcatcgtgcgtcagcgcggcacccaattccacgccggttacggtgttggcatgggtaaagatcacaccctcttcgctaaaatcgaaggcgtgatcaagtttgaagtaaaaggcgctttcaaccgccgttacgtgagcgttgtcgccgcttaattgcgcgatcgctggaaaagccctgtctcgcgacggggctttttcgtttgtggagtgagtctcttgcaaagctgtttgtgatgggctcaggcgctggatacgcggtcattgtttgaggtcgctgcgctcatttttgcaagagtcttatgtcttggtttcttaagctcgtccgtgcgacgagaggcgttttgttatgaagttcgttgatgaagtttccatccgagtaaaagcaggcgacggcggtaacggttgcatgagtttccgtcgcgaaaaattcatcgaaaacggtggccccaacggcggtgacggcggtgacggcggttccatctacatgatggccgacgaaaacctcaacaccctggtcgactaccgttacacccggcacttcgatgccgagcgtggctccaacggcggcagcaccgactgcaccggcaagaaaggcgaagacctggtactgcgcgtaccggtcggcaccacgatcatcgactccgccacccaggaagtcatcggcgacctgaccaaggccggccagaagctgatggttgtgcagggcggctggcacggtctgggtaacacccgattcaagtccagtaccaaccgtgcgccgcgccagactacgccgggcaagccgggcgagcagcgtgacctcaagctggaaatgaaagtactggccgacgtaggcctgctgggcttgccgaacgccggcaaaagtaccttcatccgctcggtctcggccgccaagccgaaagtggctgactacccgttcaccaccctggtgccaaacctgggcgtggtcagcgtagaccgctggaaaagcttcgtgatcgccgacattcctggcttgatcgaaggcgcttccgacggcgcaggcttgggcattcgcttcctcaagcacttgtcgcgtacccgtttgctgttgcacctcgtggacatggcgccgctggatgacaccagcgcaccggatgccgccgaagtgatcgtcagcgagctgaccaagttcagcccggcccttgccgagcgtgaccgttggttggtgctgaacaagtgcgaccagatcctcgaggaagagcacgaagcgcgcgtcaaggaaatcgtcgaccgcctggagtgggaaggtccggtctacgtgatctcggccatcgccaaagaaggcaccgagcgcctgacccgcgacatcatgcgctaccttgaagaccgtgctgaccgcctggcggccgaccctgtgttcaaggctgagctggccgaactcgatcagcagatcgaagacgaagcccgcgcccagttgcaggccctggatgaccagcgtgccctgcgtcgcagcggcgtgaaatcggtccatgacatcggcgacgacgattgggacgaagaagacgtggatgatgaagacggtccggaaatcatttacgtgcgcgactgattcgttgcagtaaacttaagcgccgctccctggagcggcgttttggtatctgggaatcggtagccacgaataacgttttgggcggcgctgggtcgcgcagccctcactctaaggttgaagatgatgcggagcaaagtgacaggtgcgcagcgctgggtcgtaaagatcggaagtgcgctgctgacggcggatggcaaaggtctggatcgcgcagccatgagcgtctgggtcgagcagatggtggccttgcatgaggcgggcgtggaattggtgctggtatcgtccggggccgttgccgccgggatgagccgcctcggctggaccgcgcgacccagcgcgatgcacgagctgcaagccgccgccgccatcggccagatgggcctggtgcaagcctgggaatccagcttcgccgagcacggccgccacacggcgcagatcctgctgacccacgacgacttgtccgaccgcaagcgctacctcaatgcccgcagcaccttgcgcgcgctggtggagctgaaagtcatcccggtgattaacgagaacgatacggtggtcaccgacgaaatccgtttcggcgacaacgacaccctggccgccctggtagccaacctggtggaagccgacctgttggtgatcctcactgaccgcgacggcatgttcgacgctgacccgcgcaacaaccccgaagcccagctgatctacgaagcccgcgccgatgacccggccctggacgcggtggccggcagtgtcggcggcgccctgggccgcggtggcatgcagaccaagctgcgcgcggcacgcctggcggcgcgctccggtgcccacaccatcatcgtcggcgggcgcatcgagcgcgtgctggaccgtctcaaggcaggcgagcgcatcggtacgctgctgtctccggaacgcggcatgcttgcggcgcgcaaacaatggctggccggtcatctgcaaacccgtggcaccctggtgctggatgctggcgcggtgtctgcgttgtctcaaggcaacaagagcctgctgccggtgggcgtcaaactggtgcagggcagctttcgccgcggcgagatggtggtgtgcgtggcgcccgacgggcgggagatcgcccgtggcctggctaactacagcgcccttgaggcgcagaaaattattggacaatcgtctgatgcgattgtcggactcttgggttacatggccgaaccggagctggttcaccgcgataacctgatcctggtctaaataaaaggaatacacgatgcgtgtcatgaagggattgctcggcctgctgctggcattgccgttactggcctcggccgaagaaatcggccaggtgtcgacggtcttcaagtttgtcggccccaacgaccgcattgtggtcgaggcgtttgatgaccccaaggttgacggtgtgacctgctacctgtcacgcgccaagacgggtggcgtgaaaggcggcctgggcctggccgaagaccgtgccgaagcgtcaattgcctgccgtcaggtgggcccgatccacttcaagggcgagctcaaggatggcgacgaagtgttcaaggagcgtacctcgctggtgttcaagaccatgcaggtggtgcgcttcctcgacaagaagcgcaacactctggtttacctggtctacagcgaccgcttgatcgaaggcagcccgcagaatgcggtcacggccatccctattttgccttggccgaccgcgcagtaaccggcgggcgagtttttcaaccggcgtctatgattgcaggcttgtggcctgtaatctcgaaaagccgcaatgcgaagaacatgggatatctggagttcgtcatgagtgctttccacgacctgaaactcaaagctttagacggtcatgagctaccgctggcgcccttcaaggggcaagttgtgctggtggtcaacgtggcctccaaatgtggcttgaccccgcaatacgcggcgttggaaaacctctatcagcagtacaagagccagggcttcaccgtgctgggcctgccgtgcaaccagtttgcgggccaggaaccgggcaccgaggaagaaatccgggaattctgtagcctgaactacggtgttacgttcccgctcggtagcaagctcgatgtcaatgggcctgatcgtcaccagctgtaccgcttgttggcgggcgaaggtgccgagtttcctggggatatcacctggaacttcgagaagttcctgctgggcaaggacgggcgggtgctggcgcgcttctcgccgcgtaccgcgccggatgatccgaccatcgtacaagccatcgaaaaagctttggcctaaatagcgggcttgttgtggcgagcgggcttgccccgcgttgggctgcgcagcagccccaataaactcaccgcgattctccagacactccgaagtgcatggttttggggccgcttcgcgccccaacgcggggcaagcccgctcgccacaacaagcgcgctcaccacaggtcagcgcttcttcgcttcccgcgcttttatcccttaatcacccagatcaatagtgcttccacacgctgcgcacgcgcaatattatccacatcataaatccctctgccgtggagtgctccatgcctgtccaagctttattcaaacccttccagctcggtgcactgcagttgtcgacccgcgtggtcatggcgccgatgacccgttcgttttccccgggtggcgtacccaattccaaagtcatcgagtactaccgccgccgtgccgctgccggtgttggcctgatcatcaccgaaggcacggtggtggggcatcaagcctccaacggttacccgaacgtcccgcatttttacggtgaagccgctttggctggctggaagaaagtcgtcgacgcggtacacgccgaaggcggcaagatcgttccgcagctgtggcacgtgggcagcgtgcgtcgcatcggcaccgagccggatgccagcgtgccagcctacggcccgatggaaaaactcaaggatggcgttgaagtcgtccacggcatgaccacgcaggacatcaaagacgtgatcaacgcgttcgcccaggccgccaaagatgcgcaaagcatcggcatggatggcgttgaaatccacggcgctcacggctatttggtcgaccagttcttctgggagggcagcaaccagcgtaccgatgaatacggcggcagccctgccaaccgttcgcgttttgccatcgagctgatccaggccacacgcgccgccgtgggccccgacttcccgatcatcttgcgtttctcccagtggaagcagcaggactacaccgcgcgcctggtgcaaaccccggaggccttgggtgaattcctcaagccgttgtccgacgccggcgtggacattttccactgctccactcgccgtttctgggagccggaattcgaaggttccgacctcaacctggccggctggacgcgcaagctcaccggcaagccgaccatcaccgtgggcagtgtcggcctggacggcgagttcctgcagttcatggtcaacaccgacaaggtcgcgcaacctgccagcctggaaaaactgctggagcgcctgaacaacgacgagttcgacttggttgccgtgggccgcgccctgctggtagacccggattgggccgtgaaggtgcgcgaaggtcgcgaaggcgacatcctgccgttcagtcgtgaggcgttgacgaccctggcgtaaggggcgacaggcctgacgccatcgcgggcaagcccggctcccacagtggaatgcatgttcttgtgggagccgggattgcccgctatggcgatctgacgaccaacacctgcgtcagatcaagcgcgactgccctgcaatcaccggctgttcgccgcacacaccgcgcaactgccgttcaaattgctcgataatcgccggccagccctggcggctcgcgtgttgccgggcattcaggcgcatgcggcgcaaactctccgcatcctccagcagccagttggccgcatcgcaaaacgcatcctcatccccaggcatcgccagcacgccgttgtagccatgacgaatatgttgagtcgcggccgcttgatcgtatgcgaccacacccaaccccgaagccatggcttccagcacgacattgccgaaggtttcagtcaggctggggaacagaaacacatcgcccgatgcgtaatgtcgtgccagttcttcaccgcgcagagtgccgcagaaaatggcttccggcagctccttttccagcacggcccgttgcgggccgtcgccgacgatgatcagtttcatctgacgcatcgggtaggtgtcctgcaacgtctcgaaacagcgcttgagcagtcccagattcttttcctgcgccaagcggcccacatacagcacggcaatttgcttgtcgttcaacgcccagctttcccgcagcgcgctgtcgcgcctggccgggtggaataattggctatcgaccccgcgcgacaacatgcccaggcgctcgaaactgcggcgctccagctccaggcgctggctggcgctgggcaccagagtcaaggtcgagcggttgtgaaaccagcgcaagtagtgggtgaccatgcggctgagcaggctcaagccatactgattcgaatactgctggaaattcgtgtgaaacccgctgaccacgcctatccccaggcggcgcgccgcgcgcaacgcggacagccccaggggcccctcggtggcgatgtacagcacatccgggcgttgccgggtccagcggcgcagcaacttgtgcatcgacgactggccccactgcaggcccggatagcccggcagcggccagccacggcacagcaacagttcatcgtcgctggggcgggtttggtcagcgccctggcgcgggcgcaccagttcaacttgatggccgcgtgcgcgcaaaccgtcacacaggcggccaagggtattggccaccccgttgatctccggcgggaaggtttcggttatcagggtgatgtgaagcgaagctgtcgtcatgacccacagtgtcaccgtgggccatgtcgtcattgtgtcatcggcatgatggatttatgacttggtcactttttgctgctgttccatcgcctcggccccttgttcgcgcacccagaacaaggtggctccggccaccgctgccggcatcatcagcaggttgaccaccggtaccagcaacaccaggtaaacgatcccgccaaaactcatgctctgccagcgtttctggcgcagccaggcgagcatttcgttccagcccagcttgtggttgtcggccgggtagtcgatgtactggatcgccatcatccacacgccgaacaacagccacagcggcgcagcgaccaggttgaccaccggaatgaacgacaggataaacaggccgatggcccgcggcaggaagtagcccagcttgcgcatttcccgcgccagggtacgtggcaccatggcgatcagctcagcccagctgaaggcaggaaaatcatcggtgccgcgcaccacgacttccactttctccgagagaaacccgttgaacggtgcagcgatgatattggccagcatggtgaaggtaaaaaacaccatcaacaccaccagcaccacgaacagcggccacaggatatagctgaggaaactcagccagctcggcagcgttggcatcaagtggtcgacccacaggctgaattgatggccagcgaaatagatcaaaccgacgaacagcaccaggttgatcgccagcggcagcagcacaaacaggcgcaggccagggctcaacaccagtttgaggccttcgcgcaggtattgcgggccggaaagagcaggggcgggcatgtagaactccgagcaaagggacgaacgcgccgaccttaccggctttgcatcgctgacgaaagccgcgacatcagcagtaacaaacacgtcgatcaaccgggtcgactgcatagagaccacctatgagctggattgttattccgtatttccttaatcttgcccccctctatacgctgcacccattattttcaggacgtgcgagttcaagccttccccaagtgcttcgcggtccttttttattccagccgccttgttgtccgggcggtcgacaggagtgagtcatgtctgatacccgtcattcgcgagtgattattctcggttccggccctgccggttacagcgctgccgtctatgctgcgcgggccaacctcaagccgctgctgatcaccggcatgcaggcgggcggtcaattgaccaccaccactgaagtcgacaactggccgggcgacgtccacggcctgaccggcccggtgctgatggagcgcatgaaagagcacgccgagcgctttgaaaccgagatcgttttcgaccatatcaaccaagtcgatttctcgaaaaagccttacagcctgaccggcgacagcggcgtctacacctgtgacgcgctgatcatcgccaccggcgccagcgcccgttacctgggcctgccatcggaagaagcgttcatgggcaaaggcgtttccgcctgcgcgacctgcgacggtttcttctaccgtaacaagccggttgccgtgatcggcggcggtaacacagccgtggaagaggcgctgtacctggccaacatcgccagcaccgtgaccctggttcaccgccgcgagaccttccgcgccgagaagatcctgatcgacaagctgcacgcccgtgtcgctgaaggcaagatcatcctcaagctcaacgccaccctggatgaagtcctgggcgacaacatgggcgtgaccggtgcccgcctgaaaaacaacgacggcagcttcgacgagctgaaagtcgacggcgtgttcatcgccatcggccacaccccgaacacttcgctgttcgaaggcgtgctggaagccaaagacggctacctggtggtgcagggcggccgtgaaggtaacgccaccgccaccaacatcgagggcatcttcgccgccggtgacgtggctgaccacgtttaccgccaggccattacctcggccggcgccggctgcatggcggccctggatgccgagcgttacctcgacgggttgaaggacgctgcgttctaaaccctggaaatgaaaaaaccggctgagaggccggttttttatgcgcgtgatttgatcaacaacacaaatcaaatgtgggagctggcttgcctacgatggcggtgtatcagtcaccaccgccatcgcaggcaagccagctcccacagtgaccgtatttcacattgaatcagcggcggctcagcggttgtgcggcaaacttcacacccgccaacccctgcgcaatcagcgcacgaatattgccgtgatcgctgccctcaggcgtcgccaccaccgagcggtaatgctcaccaaacgccagcagcgcttcctgatcgctcaaaccttccagcagtgccaaacccaaggtcttgcacgaaccctcgttctggccggcggcattttcaacatcgccgttggtgaaggcttgcggctggtagtcgtaacccgcggctacaaaagccagggtgtcggcaaatacatgttcgccgctgttgaggctggcacgcagggcattcaaatcagtcatgggtttttcctttggcgaacgccgcttgttggtcggcgctggcttctttctggtattgggctttccactcggcgtacggcatgccgtacaccacttcacgggcgtcatcgaggctcagctcgatctggcgctcgtcggcctcggccttgtaccacttggacaagcagttgcggcagaagcccgagaggttcatcaggtcgatgttctgcacatccttgcggctgtccaggtgcgccaccagccggcggaaggcggcggcttcgagttcgaggcgttgttgatcgttcataaggctcactgaaaatcaggggggttagcggctggccgccagggtaatcgaaaccgattcggcaaaacgcagtgcgtggggtttatccacttcgacttcggcgtacagcaccgattcattggtcatcaccagatcgagcaattcctgggtcaggcgctccagcaaggcaaagcggttgccttcgacgtgggcgatgatcgccttggtgatggtgcggtagttcagcgcgtggtcgatgtcattgtcgcgcacggcttcctgggcggcatacaggatggtcaggttgatcagcacgtcctgcttgttgaggatctcgtcctcgttgatgccgataaaagtgcgcaggcacaggtccttgacccggatgcgcgccatgcctggttgaagttgtggcattgctacttgctccgtccgatcagttgcaggaactccatgcgcgtggtgttcgactcgcggaacgcgccgagcatcaccgaggtgttcatggttgaattctgtttttccacgccgcgcatcatcatgcacatgtgcttggcttcgatcaccaccgccacgccggcggcctgggtgacctgctggatggcgtcggcaatttgccgcgtgaggttttcctggatctgcaggcgccgcgcgtacatatccacaatgcgcgccagcttcgacaggcccagcaccttgccggtcggaatataggccacgtgggccttgccgataaagggcaacaaatgatgctcgcacagcgagtacaactcgatgtccttgaggatcaccatctcgtcattgtcggaggcaaacagcgcaccgttgacgatggtgttcaggtcctgctcatagccatgacacaggtactgcatggccttggcggcgcgcttgggggtgtcgagcaggccttcgcgctccgggtcttcgcccaggcctttgaggatctcgcggtagtgttggggcagggacaaggtcatacaacatcctcacaaacggcttacttgatatgccgcccgccgttgacggtcagggtggtaccggtgacataggggttgtccagcaggtaacgcacgctctggtagatcacctcgggcccgggctcgatgcccaacgctgccttggccaggaccttggcacggtaggccgcgtcgtcgccctcgttgaacatcaccatggccggcgcaatgccgttgaccttgatcagcggcgcgaactgcgcggcaaacgacaacgtgaggctgtcgagcccggccttggtggcgcaataggcgatgtgctggcggctgcccttgcgcaccacgtcatcgctgatgtgcacgatatcggcaggtgcgcagcgttgcagcaaagctgaacaatgcaggttgatcaggtacggtgcaagcatgtgtacgctgaacatgtcgctgaatgcgcggctttcgtcgccaggcgtttccgcgatccaagccgaagcgttgtgaatgatcgcgcgcaggctgtcggtatgggttttcagctcggcgatgaaggcgagaattcccgcttcactggagaagtcggcaaatacgccaaccgcgccacgttcgcgcaaggcttcgacacccgggcgttcgctgcggtagctgaagatcaccggttggccctcgtccagcaagcgctcggcgcaatgcaggccaacgcgctggccggcaccggtgatcaggatcggggcgtctgttgcagtcatgggaggctcacgtcgctggcaggtggaaactataccagtgagcggccgcccctgtactcaagcggcggcttcggtggccttggcccttggcgcgctcgggtgaagccagttcgccagcagatgtgtcgacagcgggatgaaccaataaaccatcaatggcgtgagcgccatggtgctgaccagcacgcgcgggaccaggtccagttcgctgagcagtggccccagaacaaagttgaacagcagcgacaccgggaaaaacgccagccagatcgccaccgcctgtttccagcgcggcgggcgtgcgcccacggcgccaaaccagccgtcgatgccgcttacacgatgttcggacgggtcggcaaacagctcgctgccacgactcagccacgcactgcgcgaggcggagaactcccaggcatgcagggttttttcatcggcgaagcggaaaataatctggaattcatcgtcatggggcggtggtgccagcacgccggaacccagataaccggggaagtcagtggccaattgctcgccttcgcgcaaccaggccatcagttcttcgtagcgccctttggccacgcggcgcgcaaccatcaaggtgacgggggaggtagacattgtgtatctccaaataaacgggtgcgctgaaccgggtaggtggcgcacgaacgacgctgcggggtgttgcaacgacgtgaaaaaagcaggcaaggattattcctgttttggccaaatacgccagaaacttcggacgggccgcagcggaccttgtatcggtcaacacacgggcgttaaataggatccaaattaacagaagtgtttcctacctctgatgcctgaaatcattgctccccagcgcgaatcagcgcacgaccgtcctgttgatactgaggcgctggttcctattcgcgaagtgtcacggttgaccggtgtcaacccggtgaccttgcgtgcctgggaacgtcgttacggtttgattcagcccactcgcaccgaaagcgggcaccggctgtattcgagcgccgatgtcgacaccgtgcaccgcattcttgactggatcgaacgcggcgttgccgtcagtaaagtcggcaagattcttgcgcgcgatgatttgcgcggcatgccggccacggcatcacgggttgataccgaattggaatggcagcagtggcaaacgcaattgcgcctggctatcaacgcattcgatgaccgtcaattggaccggttgtatggccagattttctccgcgtactcaacggcagtggtgtttcaggacattctgatgcccttgtggcaacagctgttacggcatcacggcagctttgggcaggccagcgagtggctgttcttcgacaacttcctgcgttcgcgcgccgctcaacgcttgcaaatgttgtgcgcttcgccggcgcccagggtgctcctgtctgccattgccggggagtgtcgtgagcttgagctactggtggcaggcttgatgatttccagcgaaaaactcgcggtgaaggttttgggggttggccagccgttcgatgagttgacgctgatttgcgataagacccggccgcaagcccttgtactgttttccaaccgctcgcccggcagcgagttgccgtcgcggctcaagcgtctggccatgacgcttgactgcccgctgttattggccggtgatgcctctgacctggccgatcaaagcctcgcgggttcaccgatcggttgcctgggcaacgacgcacgcttaatgcagcgccgcctgcagcaatttctcagcggccagctggatacctgatttcaggcgtggacatgcgggtgcaccaggcgatgctgatgcaggatgaactggcgcaagcgctcgatttcatcggcatcactctggttcaggcggtaggcgaacaagccccgcgcggtttcccgctccagggtgccacgcagggcaatgcgctcgtaacccgatgggctgaaccatagcgaaaaggttttcggcgccttgacccggccacgaatctctatcagtacgcccttgaatgatacttcgtgcacccacagcgccgccgggttaccccgcacgttctccagtgccaccggcgtttgcagcgccaggcgccagggccggatcatcggtccgtcttcaaaaatactcggcacccccaaccgcagatgcaccgcatgaaactcgtcttccaccaagtgcaggggaaaggtgagttgctggttgtcgaactgcgcctggatagtgacttggtcatgagcggcgagccgtgtgagcaaatcacgaatctgcgcaccgccgttgacggtcaggctcgaccacgcatcccgcaggttgagctgcgggttgtgctgcatgtcctggatgaaatccagttcgtcctgcgtcaagagagtgtcgcggtgcattgatgtagctcaagggtgaggcattaaaaagccattatcgctctaaatgccgcgttttctacaacttgttcactccgcccgtcgccttgagcgccgccacctgcgcttttaactcggccacctgcgcttccagctgcgccacacgctgctgcgctttgacttgggtggtgacgtctttctgcacgccgacgaaataggtttgcttgtcggcctcgttatacaccgtcgatagcgacagctcgttccagaaatgactaccgtctttgcggtagttacgcaggatttcgcggcaggagccgccgctgtcgagcgcttcacgaatagccatcagggccggctggtcgcggtcccccgactgcaggaagcggcagtcctgatacaggatgtcgtccagggcgtagccagtcaggcgttcgaaagccgggttgacgtaaatcagcggcttgtcctggccttcccgttcggccacgacgatgccgtcgttggaggcgttgatcaccatttgcatcaggttggcgttaatcattgagcggtccatggcttgtatttggaagcttgagtttatggcaagtcttgaatgttgcgccgggtgcgctgaaatatttgcgtcagctgctaatatcccacgctttcgctcaaccacaggatcagattgatgaaagtcgccatcctttccggctcggtctacggcacggctgaagaagtcgcccgccacgccgccgacattctcaatgcggccggttttgaggcctggcacaacccgcgcgccaccttggccgatgtgcaggcctttgcgcccgaggcatttctggcggtgacctcgaccaccggcatgggtgaattgcccgacaacctgcaacccctgtattcgaccattcgggaccaattgcctgccgcctggcgtgggctgccgggtgccgtcattggcctgggtgatgcgagctacggcgacaccttctgcggcggcggcgagcaaatgcgcgagctgttcggcgagttgggcgtgcgtgaggtgctgccgatgctgcgtctggacgccagcgaaagcgtcaccccggaagctgacgccgagccgtggctggccgagctggtcactgcactgcgcggttgaccggatactcgcgcagtaacgccagccaggcctgggcggctttcgacagataggcgccctcacgccagataaaagcaatgtcccagcgcaggtagtcgggcgccttgagggtcaggcgcaccacgccgggtcgcaccagtgcgcgcgcgaccacgctgggcagcagcaccacgccttgcccggccgcgaccagtgcagccagaaagtccgcctggccgctgcgcccgatttccttcggcgtaaaacccaattgctgacaggcctgcatcaggcgatcgttcagtacgaagctgcgctggtacatcaggaagggcgtgtccgccagctcctccagacgcacttgggcgttttgcgccagcgggtggtccatcggcagcaatgcatccaaaggcacgtcgcagaaggcttgccaggcgaaggccgggtcgctgggcatcaggctgccgcccacatccagctcgccgttcaaaatcgcgcgttcgatattcctgctgccgtcttccagcaactggatggtcacgttggggtagcgcctgcggtactcggcgtacaaaccggcaaacaaggtatcgcccgccagcagcggcaggcccaggcgcagttcgccacgggtcaattgctgcatgtcgtccagctcgctgagcagttccgactgcaggcgcagcatcgcttcggcgcgctgcagcaccacctcgccggtggcggtcaggcggatctgtgagcctgtgcgttccagcaacggcgtgccgaggctttgctccagctgcgccacctgtttgctgactgcggactggctgatgtgcagggttttgcccgcttgggtaaaacctccgcggtggatgacttcgacaaagctgcgtagttgtttgaattccattgccatgattccagtctggaatagttggcagtctaacaattcgctgtggggataggtgtggcctctttaaaatgggcgcctgcgaggacccaaagcccatgaaacgtttcacccgtttgctgaccgaactggtcatattgctggccatctacctgcttggctgccgattggctgcgtggtttgcatggccgatccccggcggcgtggtggggctgggcctgttgctggcaaccttcgccagtggcttggtcaagcctgcggcactggaattgggcgcgggtgcgttaatggccgagatgctgctgttttttatcccggcactgatgagcctgctcgactacggtggcctgctgcgcagtgagggctggagaattctgttggtgattggcttcagcacgctgtcggtgatgctggtcaccgcgttcaccgtggaaatggtctgccgctggaggctgcgccgtgaagcttgagctgatgccggtattctggctcgccttgaccctgggcgcctatgccttcagccgctggatttaccggcgtaccgggcgttacctgttgtctccgctgattctggtcccggcactgctgctcgcggtcgccgtgccgatgaaaaccgcctacgccgaatattccgccgacacccattggctgatgctggtgctgggcccggtgaccgtggcattcgcggtgccgatctggcagcagcggcgcttgctggcgcgccactggtcggcgttgttgctgggcatggtggcgggcagcgcggcgtctatcgccacctccttcggcctggccaaggcgttggcactggacagttcggtaacgatgtctttggtgccgcgctcgatcaccacaccgtttgccatgccggtgtcgtctgacctcggcggcgtgccggagcttacggcagtgtttgtgatgttcaccggggtgtttggcgccatgctcggcggtattttgctcaagtggttgccgttgcgcacgcctctggcgcgtggcgccttgtttggcgtgggcgcacacggcgcgggcgtcagccgcgcgcgggaagtgggcggcgaggagggctcggtggcgggcctggtgatggtgttgacgggcttgctcaacctgttcgccgtgcctttattggcggcgcttctctgacgcgtagtggactattcttgtctctgactcgctcagtcatcaagctggctgcgaaggcaactccttgcgccacgctgtctgactagactggcccctcacttaaaaaaacaataagaacgtgcaccaaggaggtcgttgccgtgagcctagcccccgttcagtcgtcaccgaatgtcaaagatcaggtcagcgctgccgagtggcaagcccgtgtcgacctcgccgcctgctatcgcctcgtggcgctgcacggctgggacgacctgatcttcacccatatctcggccaaggtgccaggcaccgatgatttcctgatcaacccctacgggttgatgttccacgagattactgcgtcgagcctggtcaaggtcgaccaggccggcaacaagctgatggacagcccttacgagatcaaccccgccggctacaccatccacagcgccatccacgacgtgcgccacgacgtcacctgcgtgctgcacacccacaccgccgccggtgtggcggtggcggcgcagaagcaaggcgtgttgcccatcagccagcaatcgatctttgtgctgtcgagcctggcctatcacgcctacgaaggcgtagcgctgaaccctgaagaaaaggcgcgtttgcaggccgatctgggcgaaaacagcttcctgatgttgcataaccacggcttgctcacgtgtggcagcaccatcgctgacaccttcctgatgatgttcacctttcagcgcgcctgtgaaattcaggtgctggcgcaaaacggcggagccgagttgattgccatcgggccgcagatccttgccggggccaaggcgatggtggcagctgtcacaaagagcgcccaaggtatgggaggcgcgctggcttggccggcgctgctgcgtaaactcgacagccaagaccccgggtataaaagctgatgccactcgccgaaatcccgctcagagcctggcgtaaacgcagccagacgttcgtctttcgtggccgcacccttcgttattgggtggccgggcagggcgagccgctgttgttgatccatggttttcccaccgccagttgggactggcattacctgtggcaacccctggcccagcgtaacctggtgatcgcctgcgacatgctcgggtttggcgagtcggacaaaccgctggatcacgactattgcctgctggagcaggcggacctgcaacaggcgctgctcgaccacctgcgtgtggagcagccagtgcatgtgttggcccatgactacggcgacagcgtcgcccaggaattattggcccgccattacgaaggccggtttcagatggccagctgtgtattcctcaacggcggtctgttcccggaaacccaccgcccggcgctggtgcaaaagctcttgctgagcccactgggctggatgatcggccgtgccttcgggcgcaatgccctgtccaacagcttcagccagattttcggcccgaatacccgccccagcgaaagcgcgctggacgatttctggagcctgatcaactgcaatgacggtacgcgcatcctgcataaactcatcgcctacatcccgcagcggcgtcgcctgcgcgagcgttgggtggacgcgatgcagcgcgatgaagtgccattgcgggtgattgacggcgaggtcgacccgatctccggcgcgcacatggtggagcgttatcaccaactggtgccgcacgccgacaccgtgctgctggccaatatcgggcattacccgcagatcgaagcgccggtgcaggtgctcaagcattatttggcgtttcgcgagcggatcgctggaccggtgttggagttggcttgccagcgatagccttatcgcggtgttccagaaagatcatggcgcctgtatcgcaggcaagccagctcccacctttgaccgcatttcaaaagatggacccggtcccctgtgggagctgtcgagctttagcgaggctgcgatggcggtgggtcaggcggcatctttgttggcagtgctgccgtcttcgcaggcaagccagctcccacactagccggctcacacacaatcatccctctgccttatcgagcaccattcagcctcggccgactttattgtgacccgaggctgcgtgcctgacactcaacccattcccattattgccagcggagttcggtatgagtgagtcagtgcagttccaggataaggtcgtgatcgtcaccggcgccggcggcgggttgggccgggcccatgcgctgctcttcgcccggcacggggccaaagtgctggtcaacgatttgggtggctcgacccagggtgagggcgccaatgcctcggccgctgaccgcgtagtggccgagatccgcgaagccggcggcatcgccgaagccaaccacgactccgtgaccgacggtgacaagatcgtgcaacacgccctcgacgtgttcggccgcatcgacgtggtggtcaacaacgctggcattctgcgcgacaagaccttccacaaaatggaagacagcgactgggacctggtttaccgggtgcacgtcgaaggcgcctataaagtcacccgcgccgcctggccatatatgcgcgagcagggttatggccgggtgatcttcacggcgtccacctcgggcatctacggcaacttcggccagtccaactacggcatggccaagcttgggctctatggtttgacccgcaccctggcgctggaagggcgcaagaacaatattctggtcaacgccatcgcccccaccggcggcacgcgcatgacagaaggcctgattccgccgcaagtgttcgagcgtctcaagccagagttggtcagcccgctggtggtgtacctgggcagcgaagcctgccaggaaacctcggggttgtttgaagtgggcggcggctggatcggcaagacccgttgggagcgcagcctgggcgtgggctttgaccccgaggccggcttctcgccagatgatgtggcggcgcactgggcacagatctgtgactttgaaggctcagcccaccccaaggacaatatcgaggccttgaaggagatgatggccaatttgcagaagttcagcctctgatcgttgcttgaacttcactcaatcctgcggggcgcctagggcgccccgttttattgcaggcataaaaaaggccgctgcaaaggcagcggccgaagtaagacgttggatcaaggagcgacaaatcaacgtcagtgaacagcggtaatagattgaaaaatgagccaatctatagaagtcagacttttcttgccgttaggcaagcgggctatttgccctgaaagtgcgttaagaatagtcggttgtaacaaaatgagtaatagcagttcgggacaaggactgttacagatcgggcaacagtcgaaagggccatccattcccctgataaccgcccatctaccggatccatggccttgcccaaaccccggccagaggggctgttaatcctttcgagcgacaacacgaatacctccttggtgcgcttatccctcctgaccggcggcagtagggtgaggccttctgtcactcaccggggaagacgcatgacaaaaacaacaatgcgcgccatcttcacgccacaggcgctcgccgctgcggttgcgctgggctgctgtgcccaggcgcaggctgtttcgttcaacattggcgagatcgaagggcaattcgactcttcgctgtcggtcggcgccagctggggcatgcgcgatgccgacaagaagttggtgggcacgcccaacggcggcacggggcaggcgtccaccggggatgacgggcggctgaacttcaagaagggcgagaccttctccaagatcttcaaaggcattcacgacctggagctcaagtacggcgacagcggcgtcttcgtgcgcggcaaatactggtacgacttcgaactgcaggacgaagaccgcgagttcaagcagatcagcaaccaccatcgcgatgagggcgcgcgctcctcgggttatgagctactcgacgccttcgtctaccacaactactccatcggcgatttgccgggcaacgtgcgcgtgggcaagcaggtggtgagctggggcgagagtacgtttatcggtaactcgatcaacagcatcaaccccatcgacgtctcggcctttcgccggccaggcgctgaaatcaaggaaggcctgattccggtgaacatgctgttcgcctcccaaagcctgaccaaccagctgtcggtggaaggtttctaccagttgaactgggaaaacaccgtggtggataactgcggcaccttcttcggcaacgacgtggtcgcccacggctgcaacggcaactacaccgtcggcaacccggcgattgcgccgttgcaaccggtggcggcggcgtttggccagggcttccaagtgacgcgtgaaggcgtggtggtacagcgggccaaggaccgcgacgcacgcgacggcggccagttcggcgcggccttgcgctggcttggcgatgacactgaatacggcctgtatttcatgaattaccacagccgcacgcccacggtgggcacgatcaccgccaacaccaacctggccaccatcggccgtattgtcagcaccgccaacgccatcgcgccgggcaccgggtctggcctggcccagagcaccatgctcggccgcggccagtactaccttgattacccggaagacatccgcctctacggcgcgagcttctccaccaccttgcccaccggcacggcgtggaccggcgagatcagctaccggccaaacgccccggtgcaactcaacaccaccgacctcacgctggcgctggtcaacccgattgcgggcaacaccgcctcgccgatccgcagctccttcggcgcggataacgcgggttaccgccgcaaggaaatcactcagatccagagcaccatgacccagttcttcgaccaggtgctgggtgctgaacgcctgaccctggtgggcgaagcggccttcgtgcacgtcggcggcctggaagccaaaaccaagctgcgctatggccgcgattcggtgtacggcgcctacgggttccagggcgataccgacggtttcgtcactgccaactcctggggttaccgcgcccgggcgatcctggactacaacaacgtgtttgccggggtgaacctcaagcccaacctgtcctggtcccatgacgtcagcggctacgggcccaacggcatcttcaacgaaggcgccaaggcgatcagcgtcggtgtggatgcggactaccgcaacacctacaccgcgagcctgagctacaccgacttttttggcggcgactacaacaccctgaccgaccgcgactttatcgccctcagcttcggcgtgaacttctgacctggtttaaagaaggacaagaacctatgcacaagatgattgcagtgatggccctgagtttgctggccgccaacgtgatggcggcggtgtcgccggaagaagcggccaagctcggcaccaccttgaccccggtcggcgccgaaaaggccggcaacgcagacggctcgatcccggcctggaccggtggcatcccgaaaaacgccggcgcggtggacagcaagggcttcctggccgacccgttcgccactgaaaagccgctgttcgtgattaccgccgccacggtggacaagtacaaggacaaactgtccgacggccaggtcgcgatgttcaagcgctaccccgaaacctacaagatcccggtatacccgacccaccgcacggtcaacctgccgccggacatctacgagtcgatcaagcgcagcgccttgaatgtgcacaccatcaacgacggcaacggcctggaaaacttcaccggcaaccgttactacgccttcccgattccgaaaaatggcgtggaagtgctgtggaaccacatcacccgttaccacggcggcaacctcaagcgcatcatcacccaggccacccctcagaccaacggcagctacacgccgatccgctttgaagaagaagtggcggtgccccaggccattccggatatcgaccaggccaaggcggccaacgtgctgagttacttcaagcagtcggtcacggccccggcacgtctggccggcaacgtgttgctggtgcacgaaaccctcgaccaggtgaaggagccgcgcctggcgtggatctacaacgccggccagcgccgcgtacgccgggcgccgcaggtgtcttatgatggcccgggcaccgcgtccgatggcctgcgcaccaccgacaacttcgacatgttctccggcgcccccgaccgctatgactggaaactcgtcggcaaaaaagagatgtacatcccttacaacagctacaagctcgattcgccgacgctcaagtacgacgacatcatcaaggccgggcatatcaaccaggacctcacccggtatgagctgcaccgcgtgtgggaagtggtcggcaccgtcaagccgagcgagcggcacatctacgccaagcgccacatgtatatcgacgaagacagctggcaagtcgcgctggtcgaccactacgacgggcgcggccaactgtggcgtgttgccgaagggcatgcgcagttctactacgaccaccaggtgccggcctacaccgtggaaaccctgtacgacataattgccgggcgctacatcgcgttgggcatgaagaacgaggagaagagcagcttcgtgttcggctttgccgcgaaggcggcggattacactccggcggcgttgaggtccgaaggcgttcgctgatcctcatttaaaatgcaatcaatcagtgggaaccggcttgtgtgggagctgggcttgcccgcgatgcagacgactcggtatttcatgtgaaccgaggtgatgctatcgcaggcaagccagctcccacacaagcccgctcccacatttggttttgtgcatgcctttaaatcattgcgctgaatactccttcaacaaccgccaaccacaggactagggtaggcgtcaggttgcataacaataaaaaagcaggatgcagcaatgaccgccatgacacgcctcctggaccgtcctgggttcatgccccggctgtccgcccaccacctgttgcggccccatctcaccgagcctttgctcgccgcccccgcccgggtgaagttgttgtgcgcgccgggtggcagtggcaagagtgcgttgctcgccgaatgtgccttgcaggcgccttcgggctttgcggtttactggctgccattaaacggcgccttactcagcccagccgatttctgctcgcggctggcacaaaacctcggcttggcctatgtcgatgaagccactttgctgatggacctgggccgttggcaaaacaccgggtggattttcctcgatgacttctgccgccagcctgctcccgagctggatgccttgctcgaccgtttactcacagccagcagcccggcgctcacctggtggctgggcgcgcgacggcggccggtgtgcaattggccgcggctgttgctcgacgacgagctgttcgagtgcggcgagttgtcgttccgcccggccgagattcagcagcggctgaacgccgggcaaaccgtcgacagcgtcatgcagttcagcgccggctggtgcgccggggtgcgcatcgcgctgctcggcgacggccaccccgacaaaaccctgctcgactacctgcaacacgaactgttcagtaccttgcccgccgagttggccgaagcctggcgcgtgctggcccacctgccgcgtttcaaccccagcctgtgcgagcacttgtttggtgccggcgagggggatcaatacctgcgggacttgcaggccctcggcgcgtttatccagccgtgggaggacaccagcgattggttgcacatcttcccgccgctggcgcgcttgctgcgcgatgagccctggccggccaagcgtgcgtggcaccggcgcgcctgccagtggttcaccgccgagcgagactggcaggcggcgttcgagcaggcgttgctcgccgaagcctacgaagtggcggtgagcctgttgcagcacttcagtttcgaagacctgtttcgccagcagaacgccgtgctgttgttacggctgcatgaagaacacggtgatgaattgatgctgggctcggcgcagcttgtggggctggtggcggcggccctgttgtttgccgggcgctttgatcaggcgggtgtgtgcatcgaccagttggcgcggtttgccccgcaacccacggcggcgcaacagcgccatctgttggcgcgctggcaggcgcagtggggctggctgttgcatttgaacggcgatgccgagcgctcccgcgcgcactttctcgaagccttgcaggccttgccggacagcgcctggacctcacggctgatgtgtttgtcgggcctgacccagcaagccttgttgcgcggtgagctggacgtggcccaggcgttgagccgcgaagccctgtgcctggcccgcgcccatggctcgctggtgttggaagccttgctcgagttggatcacgcgcaactgctggaacagcgcggcgcaccgtaccgcgcgcaaagcctgctggaacatgtgcaggcgatgctggagcagcagcgcctcaaggccgggcctttggtggggcgcattgtcttgcggcgcgggcatctggcgttgcgtcaggggcaggacgcgctggccgccgaatgctttggcgcgggcctgaagatgtgcctgcacagccaggataaacgcgtgctatacggcttcctcggcctggcgctgctcgccgccaacaggggcgactacgcgcaggcgtttattcaattgcgtgaggccgagcggttgatgcagcaacggcatgtaccggacgcggtgtaccgcgcggtactgttgttggtcagcgggcacctctggctgcaacaggggcgtgccgagttgacggtggaagccgtgcgccgggtattgcgtcactttcgcgggccactggcccggcaggcgccgccggctacatcggagctgatcccgcgcctggaatatttgctggtgttggctgaggtgaaactgggctgcgccgagcagcccatcgcacgcctcaatgccttgctcgaaaccacgcaacaacgcggcatgctgtgcctggaaaccgagttgcagttagtgaggggggaggtggcgtggcaactgggtgatttggcccaggcccgtgtttcgttgcaggcgggcctggcgctggcggcgcgctgccaggtgcagcaggccgtgcgcgagttgcgcctgcgctcgccggggctgttgagtgagttgggcctggaaacgcaggcgtcgcctaccggcgtggtcgataaccccttgagccaacgcgagctggaagtgctgcaattgatcgcgctgggcaactccaacctggaaatcgccgaccggttgtttatctcactgcataccgtgaaaacccacgcgcggcgcatccatagcaagctgggtgtggagcggcgcactcaggcggtggccaaagccaagacgttgggcctgatggcctaggtagtgtggcgagcaggcctgtctgccacacagtgggcttagccgcagaaggcctggcggtattcgccgggagtggcgcccatggcctggcgaaagcgatgggtgaagtggctggcgctggagaacccgcacatccacgcaatctcacccaatggcagggcgccgccgcgcagcaggctttgcgcacgggccaggcggcgcgccagcagatattgatgcggcggcaagccgaagctttcgcggaacatccgcgcgaaatggtattccgacaacgcgcacaggccagccaattgactgaggctgatcgggtcttccagatggtggtcgatgtagtccaccagcaaccgccgctggtgcgccgccagcccgcctttcaagcgcaagccttcacgtgcgcccacttggctgagcagggtgtggctgagcatttcatgggccaggctgctggtcagcaagcgttcggcgggctcgtgccagttgagcgcgatcaactggtgaaagcgccgcgcctgaacggcgtcttccagaaaggtgctttcgcgcaactgtaattcccggggctcacggtcgagcagggtgacgcagccgagggcaaattgctccgggctgaaatacacgtgggccaggcggatttcgccgttgatcacccaggccgactggtgttcggccggcaggatgcacagcttgtcggggccgcctttggtgccgggcctgtcgcggcgaaaggtgccagtgccgccgccgatgtagcacgacaaggtgtgatggccgggcgcctggtaatcctgggagtcgtggtggttgctccacaaggctgcagacaagccgtcaccgagctcggcgcaggcttcaaggcgtgcgtggggcgagcggttaagggcttgaaagacttgcagggtttgcagatcaggcatggttgtgttctccgacgccttgcatcctactcccggtggcggccgctttgatcccgccagccgacaaaagcgcaagaatgtgcaagagatcaggctcgaaggcgggggacactgtggctcaatcgacggagcccgctatgaaccttttcctgtatttactcaccgtgctgatctggggcaccacctggattgcgctgaaatggcagctgggtgtggtggcgattcccgtgtcgatcgtctatcgcttcggcctcgcggcgctggtgctgttcgcgctgttgctgctcagccgcaagttgcaggtgatgaaccggcgcgggcacctgatctgtctggcccaggggctgtgcctgttttgcgtgaacttcatgtgtttcctcacggccagccagtggatccccagcggcctggtggcggtggtgttttccacggccacgttgtggaacgccttgaatgcgcgggtgttcttcggccagcgcgtggcgcgcaacgtgttgatgggcggcgcattgggcctgttgggattgggctttctgttctggccggaattggtggggcacaccgccagccctgagaccctgatgggcctgggcctggcgctgctgggaaccatgtgcttctcggccggcaatatgctctcgagcctgcaacagaaggccgggctgcggccgttgaccaccaatgcctggggcatggcgtatggctcggcgatgctggcaacctactgcgcggtgcgcggtattccgtttgatatggactggagcccgcgctacatcggcgcgctgtggtacctggtgattcccgggtcggtgattggttttaccgcatacctcacactggtcggccgaatggggccggagcgtgcggcgtattgcacggtgctgttcccggtggtggcgttgaatgtgtcggcgtttgccgagggctatcagtggacggcgccggcgctggtggggttggtgttggtgatgctgggcaatgtgttggtgtttcgtaagcccaagtctgcaagcccggttttcagagcgaaacaggcttaaaactttgggagctggcttgcctgcgatagcagtctgtcagccagctcatctttcactgacataccgctatcgcaggcaagccagctcccacatttgaccgaattgactgggttatttgaggcccaaacgcttggccatgcgcccaaggttggcgcggtccaggcccagttcgcgggcggcgctggcccagttgtgctggtgacgttccaggcaggcgctgatgatctgacgctgataatgctcagtggcctggcgcaggtcgcccgtgacgacaggggctggctcggccggtgcttcaatcaccggcggcgcgcttacatcaggcaagtccaggtcttgcgcactcaagctcagaatcttcggacgttcgcgacagtttcccagggctttcagcgcgctgcgtccgatcaaatgttccagctcgcgcacattgccgggccagttgtaggccagcagcgccgattgcgcgtcgcttgtcaggcgcaagctgcccaaccccatgcgtgagcggttctgctccaggaaaaacccggccagcagcaacacatcgcgcccgcgttcgcgcagcgccggtacttgcaacgggtacacgctgaggcggtggtagaagtccgcgcggtagcggccgttgcgcacttcttcggcgaggtcgcggttggtggcggcgatcaggcgcacatccacctgatgttccttgtccgagcccaggcgctgcagttggccactttgcaacacacgcaacagcttggcctgtacggtcagcgataactcgccgacctcgtccagaaacaaggtgccgccattggccaactcgaacttgccccggcgctcattcagcgcgccggtaaaggcgccgcgcacgtggccgaacagctcgctttccaccagggtttccggcagggcggcgcagttgaggctgatcagcggtttatcggcgcgcgatgacgcggcgtggatggcttgggcaaccagctccttgcccaccccggtttcgccggtgatcagcacggtcaggtcgctgctgcccaccagattgatttcctccacaagacgcttatgtgccttgctttggccgatcatttccttgtgctgctggccgctggcctggcggtaaatttcggcgcgttggtgctcatcttcggcgcgcagggccaggcgctcgatacgttcggcagcgttgaccgtggccgccgcgaggctggcgaaggcttgcaacgcgtccagctcgacacgctcgaaacgctcggtgtcgagtgcatcgagggtcagcaggccccagggtttatcgtcgataaacagcgggcagcccatacagtcatggacctcgagatggccgtgcaggccatcgaccaggccgtcgtaggggtcgggcaattcgctgtcgctgtcgaagcgggtagggccggggccttcgagcaatacctcaaagcgcggatgttcgctgaccttgaagcgccggccaagcgtgtcggggctcaaaccatctaccgccagcggcaccagccattcgccgtccaggcgcaacaaggcggcggcgtcgcacggcagcaaggcgcgcatggcgtgcagcaggcggcggtagcgctcgccttcgggcagttcgcgggacaggtcggcgaccaggggcagcagggtggtgagcagcgattgcgcagtcataatgactccttgtagtccttatgactataaggtgtgggaagtcatactgactacacaatatttaagttgttgaaaaataacgatttataagttggcacgaatactgattcactcaaggcaatcagttaatagactcaggagtctgccatgcttagtgcccaagaccgtgccatcgtcaaatccactgtgcccctgctggaaagcggcggcgaagcgctgatcactcatttttaccggatgatgctttctgagtaccccgaagttcgcccgctgttcaaccaggcgcaccaggccagcggcgaccagccgcgcgccctggccaacggcgtgctgatgtacgcgcggcacatcgaccagctcgaccagttgggcgacctggtggccaagatcatcaacaaacacgtggcgctgcagattctgccggagcactacccgatcgtcggtgcctgcctgttgcgcgccatttccgaagtgctcggtgacgagatcgccacccccgaggtgatgagtgcctggggcgccgcctatggccaactggccgatatcctgatcggtgccgaagccgccatctacgacgagaaagcccaggcaccgggcggctggcgcggggcgcggccgttcgtgctggtcaagcgtgtggaggagagcgacgaaatcatctccttctattttgccccggtggacaacggcccgatcctggccgccgcgccgggccagtacatcggtatgaagctggtgctcgatggcgaagaagtgcgccgcaactattccttgtcggccctgagcgatgccgggctgtaccgcatcagtgtcaagcgcgaagccggtgggcgggtgtccaactacctgcacgaccagatgcacgtcggcgcgaccctcgacctgttcccgccatcgggcgagttcacactggctgccagcgacaagccgttggtgctgatcagtggcggggtgggcattacgccaacattgccgatgcttgaagcggcgctggccactgagcggccggtacactttattcactgcgcgcgtaacggcggggtgcatgcgtttcgtgattgggtggatgccctggccgccaagcacccgcagctcaagcgcttctactgctatgccgaggatgatggtgtgagcccggcggcggataaggtcggcatgctcagccaggagcaactggccgagtggttgcctgagcaacgtgacttggacgcttatttcctggggcctaaaggtttcatggcggcggtcaagcgccacctcaaggcgttgggtgtaccggacaaacaggcgcgctatgagttcttcggcccggcttcggccctggaataacgttttcaccggcataccgagtcggcgccatcgcgggcaagcccggctcccacaggggatcgcattccaatgtgggagccgggcttgcccgcgatggcgtccgcacagccacaacattccacctgattaatcctcatttaacccctctctgttttaaccatgctctgtgtgtaaacttgccggcattggcacaacgacaaagggaaacggggatgagtgacgaattgcgtttgggcagggagcggcgctttctggtgttgctgggcatcatctgcctggcgctgatcggcggggcgctgtacatgcaagtggtgttgggcgaggcgccttgcccgctgtgcatcctgcaacgctatgccttgctgctgatcgcgatctttgcgttcatcggcgccgccatgcgtaaaaaaggcgcggtcaccctgtttgaagggttggtagtgctcagcgccctggggggcgtggcggcggccggccaccacgtttacacccagttcttccccgaagtcagctgcggcatcgacgtgctgcaaccgattgttgatgacctgccactggccaaggtcttccctctgggcttccaggtcgatggcttctgcagcacgccttacccgccgatcctgggcctgtccctggcgcaatgggcgctggtggcgttcgtgctgacggtgatcctggtgccgctgggtatttaccgtaaccgccaacgcaacgcctgagacgattcaacgaaacgccccggtccttcttgatggaaggccggggcgttttgcattgtggggatttgtgaaagggctgtgacgaggggcaacttcaggtgcgcgcagcgtgcgacatgttgtcacacggacgctgtcgcaggacgtttctgacgcgccgaagcggcccataaatttgcatcggccggccaaattgtgctgtcagttcgtggtttgaaagacagcacaaagcgcgcagggttccagcacttggctgatgtccgaatgccttgttttatggggacttggatccgtttgcgatgcccttacagcgtgtaagggaagaggcctggccgctaataacacggcaatttttgtggtttttgttgcgaatccaacgcgataagatcgcgaacctttgcgggaatggtgaaggattattgctgtaatcgataaaaattatttctttataagacatggtttatacatcgctagctaactacaatcgcccgcactgaatgtccggtgctgttcaatatttgagcattggagcggtcgaggggcagatggatggctctgtgcgaccccaggttccggcagcctttcaactttccgcaccaaatggaattggtctgtaacaaggcctttaaccacgaaatcgaataagaactcaccgcaggtccgtgaaacgtatagatatggcgtgacgggcaggctcttattcaatcgaagagaaatgccaacccttggcagggtgaagtgttggcgatcaaaacccaactgcattgcgcaagctgctttagaggtcgtgagatgagtaaaaacaggtacccccgattactaggctttttgccgctgattggcatgctgttaatgctgggaggctgcaagtggaccttgatggacccaaaaggacagatcggtctggatcaacgaaacctgatcatcaccgctaccctgctgatgctgctggtcgtggtccctgtgatcatcatgaccttcgccttcgcctggaaataccgcgcgtcgaacaccagcgctacctatgcgccgaagtggtcgcactccaccaagattgaaatcgcggtgtggctggtcccggtcctcatcatcatcgccctgggttacatcacctataagtcgacccacgagctggacccttaccgtccgctggaatccgacgtcaagccgatcaacatcgaagtggtcgcgctggactggaagtggctgttcatctacccggacctgggtatcgccaccgtcaacgagatccagttcccggagaacaccccgcttaacttccggatcacctccgacgccgtgatgaactcgttcttcatccctgctctgggcggccagatctatgcgatggcaggcatgcagacccgcctgcacctgatcgccaacgaaaaagctgaaatggaaggcatctccgctaactacagcggcgctggcttcaccggcatgaaattcaaagcgatctcgacgagccaggaagatttcaacgcctgggtagccgcagtcaaggccgcacctaaacagcttgatcaagctgaatacgacgccctgaccaaaccaagccagaacaacccggtcgccctgtactccgcgtttgaaccggatctgtttcagaaaatcgtcgacaagtacgaaggtatgaagccaggcaagccgatcgagcacgagaagaaagaagtggccgcggttgaaggttctgacacgggctcgcattcaactgctggggcagaggagtaaacgatgtttggtaaattaagttgggatgcggtcccgttccacgagccgatcgtgatggtgaccatcgccatgatcgcgctgggtggtctggcactgtttgctgcaatcacgtatttcaagaaatggacctacctgtggaccgagtggctgacgtctgtcgaccacaagaaaatcggtgtcatgtacgtcatcgttgccatggtcatgctgctgcgtggttttgccgacgccatcatgatgcgtacccagttggccatggccaccgagggttcgcctggctacctgccgcctgaacactatgaccagatcttcaccgctcacggtgtgatcatgatcatcttcatggcgatgccattcttcaccggcctgatgaacctagccttgccgctgcagatcggtgcgcgtgacgttgcctacccgttcctgaactccctgagcttctggctgctggtgtccggcgttgtgctgatcaacctgtccctgggtgtcggcgaattcgccaagaccggctgggttgcgtatccgccgttgtcgggtatccagtacagccctggcgtgggtgtggactactacatctgggcgctacagttatcagggctcgggacgacattgacgggggtcaactttctggccaccgtcctgaaaatgcgcgcccctggcatgaaactgatggacatgccgatcttcacctggacctgcacctgggccaacgtcctgatcgtggcttcgttcccgatcctggccgctaccatggcgctgctgtcgcttgaccgttacctggatttccacattttcaccaacgaacttggtggcaatccaatgatgtacgtgaacctgttctgggcatgggggcaccctgaggtgtacatcctgatcctgccagcgttcggtatcttctctgaagtgatctcgacctttaccggcaaacgcctgttcggtcaccactcgatggtttatgcatcgggcgcaatctctgtactgggcttcatggtgtggctgcaccacttcttcaccatgggctcgggggccagcgtcaacgccttcttcggcctggcgacaatgctcatttccatcccgacgggggtgaagctattcaactggctattcaccatctaccacggccgtttgcgcatcaccagccaggttctgtggaccctgggcttcatggtgaccttcgctatcggcggtatgactggcgtactgctggccatcccgggtgctgacttcgtcctgcacaacagcctgttcgtgatcgctcacttccacaacgtgatcatcggtggtgctgtattcggctacatcgcaggtttcagcttctacttcccgaaagcgttcggcttcaagctgcacgaaggttggggtaaagcagcgttctggttctggatctcgggcttcttcgtcgcgttcatgccgctctatgcactgggcttcatgggcatgacccgtcgtctgaacgccaccaccaaccctgagtgggtgccgtacctgtacgtcgccatgttcggtgcgttgatgatcgctgccggtatcgcctgccagctgatccagctgtacgtgagtgtccgtgaccgtaagcagaacgcttgcgactccggcgacccatggaatggccacaccctggaatggtcgacgtcctcgcctccaccgttctacaacttcgctgtgatccctaccgcgaacacgatcgatgccttcaccgaagccaaggaagacggtactgcgtaccagaaaccgaagcactacgagccgatccacatgccgaacaacaccgccactggcgtggtgatgggcgcgctgttgaccgtgttcggtttcgcgatgatctggcacatctggtggctggcaatcgtgggcctggtgggcaccatcggttacttcatcattcacgctgcccgtgatgatcaaggctacatggtgccggtcgagacgatcgaacgcatcgaagccgagcaacacgctcgcctggtagccgagaagaagattccggccaaccgtgtagaaacctcgttggaacaggcttaaaccatgtcgaacttagtgaccaatgctggacacgcccatgtcgatgaccatgggcacgatgaccatcaccacgactcggggccaatgaccgtcttcggtttctggctctacctgatgaccgactgcatcttgtttgcgtcgatcttcgcggtgtacgcggtactggtaaacaacgtagcgggtggcccgtcgggccacgacatcttcgaactgccttacgtgctcggcgaaaccgccttgctgttgttcagttcgatcacctacggcttcgccatgctggccttctacaagggcagcaagaaaggcgtactgagctggttggcactgaccttcctgttcggcctgggcttcatcggcatggagatcaacgagttccacctgctgatctccgaaggctacggcccgcaccgttccggcttcctgtccgcgttcttcacgctggtaggcacccacggtctgcacgtttctgccggcctgctgtggatggcggtgatgatgtatcaggtcaataaacacggcctgaccaacaccaacaagactcgcctgagctgcctgagcctgttctggcacttcctggacgtggtctggatctgcgtattcaccgtcgtttacttgatggggactctgtaatggctaatgcacactcccatgaccatgacagccatgatgcgagccacggcagcgtaaagtcttacgctatcggcttcatcctgtcggtcatcctgaccctgatcccgttcggcctggtgatgtacccgaccctgccgaagtcgatcaccttgatgatcgtgctggccttcgcggtgattcaggttctggttcacctggtgtacttcctgcacctggaccgctccaaagaacaacgcgataacgtgattgcgttcgtgttcgcaggtcttgtgatcctgctgctggttggcctgtcgatatggatcatgttcagcatccatacgttcatgatggcgaagtgaggtaagacccgatgtcgcttaagcactttatccaaatcaccaaaccggggatcattttcggtaacgtgctttctgtggcaggcggtttcttcctggcctccaagggacatgtcgatctggccattttcctggctgcaatgatcggcacctccctggtggtagcttccggttgtgtcttcaacaactgcatcgaccgcgacattgacatcaagatggaacgcaccaagaaccgcgtgctggtgcagggccttatctccctgaaactcgcactgctgttcgcgaccgtcctgggtgttgccggtgtagccctgttgtacaaggtggccaacccgttggcggcgctgtttgccgtgatcggctttgtcatctacgtcggcctttacagcctgtacctcaagcgcaagtcggttcacggcacgctggtgggcagcctgtcgggggcgatgccgccggtgattggttatgtggctgtaaccaatagcttcgacatggccgcgctggtgctgctggtgatgttcagcctgtggcagatgccgcactcgtatgccatcgcgatcttccgcttcaatgactacctggcggcctcgattccggttctgccggttaaacgtggcattcaagtggccaagaaacacatcctgctctacatcctggccttcctcgtggcgaccttgatgttgaccttcagtggctacgccggcatgagctacctcgccgtcgcggcggccatgggcatgtactggttgtacatggcctggaccggctacaaggcggtggacgacaccgtctgggcgcgcaagctgttcgtgttctcgatcttcaccatcaccgcgctgagcgtgatgatgtctctggatttccaggtgcccaaagagctgttgctgacctacgcacactgagtcaatgagtagtgaaaaaccccgccttcgaaagaagcgcggggttttttatggccgggcctttaaactattcccacctttttcaactgcaggaagcaacgcaatgaccaaaaaagccgtgatggtgttcagtggcgggcaggattcgacgacctgcctgatccaggcactggcgctgtatgacgaagtgcactgcatcacctttgattatggccagcgccatgtggcggaagttgaagtcgcgcagcagctcgccaaacagctgggcgccaccgtgcacaaagtgatggatgtgtccttgctcaacgagctggccatcagcagcctgacccgcgacaacatccccgtgccgacggtgaacagctcaggcgacagcctgccaagcaccttcgtgccggggcgcaatattctgtttctgaccctggcctcgatctacgcctatcaggtaaaggctgaaaccgtcatcaccggcgtctgcgaaaccgacttctccggctaccccgattgccgcgacgagttcgtcaaagccctgaacaaggcgctggaactgggcatggaatacacgctgcgcctggacacaccgctgatgtggctgaacaaggccgagacctgggcactggccgactaccacaacagcctcgacctggtacgcgaacagaccctgacttgctacaacggcatcatcggcaccggctgcggcaattgcgacgcgtgcaacctgcgtgcacgcggtttgaatgagtatttgcagaacaaggcggttgtgatgcagagcctgaaaggcaagttgcagctgagctaacgtgcagggacctactcggtcaaatgtgggagctggcttgtgtgggagctggctcccacacattagctggcagtaccgctgatccagcgcttgaacaacgcgcgcgcgccgtaggcgggcaggatgttgaagaacgcaaagccgactttgatcgcgatctgcacgtagatcatgctcaggatgtcgctggtctgcatcgcgccgtaaaaggcgataaagcagaacaggaaactgtcgatgatcaccgcaaagaacgtgctgaggaaaatacgcaggtacaggtatttggaattggtcagttccttgatcttgcacagcaagtaggagttgatgttctcggacaccaggaacgacaccgaagacgccaccagtaccgacgacacttgaatgatcacgtcattgtaaggcccgtcgagtttccagcctggcagccccggcaggaaggtcgagccgtagagcaggatgatgatcatcgcgttactggcaaacgcaaacagaatggcccttctagccaggcgcaggccgaattgctcgttgagcaagtccacgatcaaaaaggtcagcgggtagagaaacgtgcccggcgtgacgatgatgcccatcgactccaggtaaatcggtttggtcgcggcaatgctggtgaagatataaaacgtgaacagcaacaggttcaggatgatgtagatcatccaggagttttcattacggtcgtttatgtcataggccgtgagcgtccctccctgtgaataaagctttttgtacatgctcttaacttccattttattgaggttgtccattatttcgctgttgatgacttcactcagcttgatcttgatgaccttgccggtggcaatcaccatgatcaccgccaggcttttttcattctcaaaacccagcagtttgtatttgctgttttccaggcccgcttcatacgtggtcattgaagcgctcctcgatgatatcgccgaccacacacaggcggtctgagctggcgcacgcttcaagggtgatgaacatcttcttggtggcccggtcgtacaccagcttttctttgccggggctcgacacgcctttttgcacgatcaacaaatcgccgggctcattgatgccgggaatcgcgcgctccagtcgcacgccgatcaggttgtgggaggcgccgaagtagtaggtcagcgggtacagcgtggccagctcgccaatgcgcttgtccaggttctggataaccaggctttccttgaggaccggcacggccgccgggttcatgttgccttggggggaaacactgctttcgatgatttccttggcttcaaaatcgatggtctcgatttcgtcataagacacgccaaagaagtcggagatcttgcggatggtcgactgttgtacgttgacgaccttgccttccaggatgttgtagatggtggttctggtcaggccggcggcactgcacagcgacagctgcgtttcgccacggcttttgatcaagtacttgatgttgctcttcaagtgctcggttttttcccgtctgtgtatcacgtgctcaccacttccttttagtcatcaccgtccgtttacacgcagctgcacgaggggagcgccactcctcgggcttcgcggcggcgggagtgttgcatgcgtggggcccaagaataaagtcccgaatgcgttggcttggccgtggggctgaggcacgggcgcgcaaaaaagaacatttaatttggaaaatgtttaatttcctgtttaattaaacgcagcggttcaggacgaacccacacgcaacaccacggaggggaagcgcaccgatggcagccaacaccgcaccactcaaagaccaggccgacctgctgcgccgtggcctggccgatctgcgcgccgaagacccggagctcgcgagcctcctggatgctgaagtctcccgccagcaccacaccctgtctctggtgtcgtcgtccagtaccgtcaagcccagcacgttggttgcctgtgcttcggtgttggtcaacgtgacggccgaaggcatgccgggcaaacgccaccgccccggctgcgagcaggtcgatcgggtcgaggccctggccatccgccgggcgcgcgagctgttcgacgctcactacgccagcgtgcagtcgcactcggcttccaatgcaatcgcccaagtgctctcggcgctgcttgaacccggtgacaccttgctcggcatggcccacgaccatggtggcgatctcgccctcggcagccctgcggtgttcactggcgcttattacaaggccattcgctacggcaccacgcctgaaggcctgatcgactatgagcaggtgcgcggcctggcgctggcccatcgcccgcgcatcatcctctgcggcgcttcggcctattcgcgggtggtggatttcgaacgcttgcgtgcgattgccgatgaagcgggcgcgatcctgctcgccgacatttcccacatcgccgggctggtggcgaccgggcggcatccgaacccgatcaacgcagcccacgtcacggtgacctgcacccacaagcagttgggcgggcctcgtggcgggctgattctgtccggtcgcgaggctgataccaaagtgccaggcttgcgctcgaccttcagccgcgtccttgatcaagccgtgttcccccgcatgcagggcgcgccggcggtgaacctgatcgcagccaaggcggcggcgttgggttacgcgaaatcagccgagttcgacgcctgtatgggccgcgttcgtgcgctggctgacgaaatggcccacgggtttcaaacccatggttatgaggtggtgggcgggcgcagcgagaatcacacggtgttgatccgcctgagtgacgccatgaccggcgccattgccgaggcggcactcgaacgctgcggtatcgtggtgagcaagcacagtgtgccgggggagatgcgcccggcggctgtcaccagcggcctgtgcatgggcagtggctcgatggcgcaacgccggatcgaccgcgacggctgccgccaggtggtcgagttggtgtgcctggtgctcgacagcgtgacgcccctgggcgagcaggattaccacctggagcctgcggtgcgcgagcaactgcgtgccgaggtgcaagccctgtgcgcccgttaccccatcgctgactacgttgagggctgattgaatccgtcatgggtgtgtctgggctgtctggacaggcccgccgggcatgcttcatgctcgcctctgttgaaggatcaaggacgagacccatgcgccgcgatggccaacccgacaaaaacgcgcccctgttgcccgacgaggtgcgccaactgctcgataccgagctgagccgccgtggcttggggcatttcgaggtctaccagtgcgggccgccgctggaagaggcgcagattatttccaactaccccgacgcgctggagccctccgacagcgccgatgatttctaccggcgcggcgaactggtgtcgctgacccgcaagcgcatcaaaccgttcttctggagtgacgaaaacctcttggctgacgaggcggtgccggtgcctggcccgtgcaagccggtgggcgagggcgcgagtttcatcgtgcatggcaatcaggggttttattcggtgctcaacctgtgcagcttcggtgaagaccaacagtttcgtgagacggtgctggcccaccagagtgaactgcagatgctgctggtgtcggtctacgacgaggcgctggaaacgcgtgcacccgccgaaccgcccagcgttctgacgccgcgcgaaaccgaagtgctgtcctgggccagccttggcaaaacctacaatgaagtggcgctgttaacgtcgatgacctcgcacacggtcaagtttcacatgaaaaatatcttcgccaaactggaggtcagcaacggcaagtcggcgatccgcaaggccctgcaattgggctatatccgccatccgtcctaggcgtacctgtccttttgggcagcttgttgggtggtcggtggtgctttaggttccgcagctattgagttcgacgccggatacgccggggtcgccattgcgaagggacttccccatgacacatcaccgccaccgcgagccccgctgatgggcaccttccacgcactgcgcagcctgaacccccggttgcaaacgctgttcatgatcacgctggtgttccgcatgggcaccctggcatttcccttctacgcggcgtacctgatccatcaacacgcgatatcgccgggcaccgccggcctgctggtgggggtgtacggtgcaggggcgttgtgcacagacctgatcatcggccctgtgatcaagcgtttctcggccaaccgcgtaattctcgcctccctgttgttcaatgctgtgttgctgctggtcatcccgttggtgggcaaccccttcgcactctgtgtgttgtcgtttctctggggcgcctgctacgaagcgttcacaccggcgacgttttccgagacggtggcgaacagcacgcttgagacgcgcaaagtggcgttttcctgcaaccggctggcgatcaatatcggcatggccatcgggccgctgctgggcagcctggtgttcttgcatcacgctgatgcggtgttttacatcaacgcggccttgtcgctgatggcctttgcggcgtgcctgcgctttgggcgctcacgaacggtgccgcaagacgtgcccgccgccagcaagggcgccggcttgcccgaggcggcgccccacgagcgctcgaggctgctggtgatcctgctggcggccctgccggtgcacattgcgtatgcgttgccgccgacctttctgtcggcctacatcatcaactacacccaactgccgacgtactacgtgggcgtgctgtttttcatcaatgcggcgctggtaatcctctttgaagtgccgatcaacctgcgcatggcacacctgtcgagcagccgctcgctggtggcgggcttcctgttggccggcgtggggttctttttgatgggcttcggcgaggtgggcgcgttgctgatgctggcgacggtgctgtggagcctgggcgagatgatcgtgttcccgggcatcacccactacgtcagcagtatttccagccgcgccacggtggaccgcaacctgggttactactcggcgggcgtgaatattggcgtgatgctcgcgccgtcgctggcgttcatgttgatggcccggccggcgctgccgtcgccatggtggctggcagggtttgtgttgctgctgttcgcggtcgccgtgggcgtgatgaaaagctcggcggtgttatggaacaaggaggcgtgaaggcaacaaggcgtgcgccttgctgccacaggcgcttactgcgtggcgatggcgtaaccgtcaaaggcgctctgctgctgcagggcggtgacgatggtcttgcgtgaaaccggctgctcgacgccgctgttgtcgacgaaagtttcgctttccagctcggcttcgctgccttcgcccacaaaggtaaacccgaggaattccagcgcttcacggtcaacgttcagcttggagcgcggcgtgcgcagcggcagggtgacgctgatgccatccttgctgatcacgaacacttcggcttctttcttggggcgcgaggccttggctttaccggcgcttgggttactgatggcctggtggctctggttcagtaccttgagggccaggccgtagaccagttcctggaattcggggtcgtccttgaagctggaaaggatgcggctgatggagaatttgctgctgaggtcttccagggcagcgttgtcagccgtctcggcgtccttcaactgcttgagctggcccatcaggtcgtaggccttgtcgtcgtcgaacgcgtcgtgggcctggcggatggccacgcgcagctcgcggatctggtcgctttcccgggaggtgtggaacgcgtccagcaccatctcgctgatgatcttggccgctggcacatgctgtgaaagattgatggcgttttcgtattcagctttggattgcaaggcggctacggattcttcggctgttggttcggtgtaagaatcggacattgaaatttcactacttcagtaaacgggagacaaaaaagcgttgcgcattttcaaggggggagggggatcaggtcaaggcagcacaatgcccttatcccggcgcaaggcgctcagcgcccgttgcagccgcacggcgcggccgcagaacagaccaacggtaaaccccgaaacgccgcccactgcgatcaacatgtcgggcgtgctcaacagcagcgggtgcactgcttgctgatagccgaagtagtacttcactgcaaagaacagctgcgagatcaacagggtcttccaggtgcccggcagtaccagggtttcgccattggcgtccagccgggcgccgtcagcgttgaacagccacatgcccgccacgctgccgagcaacgcaccgccgacccaggcgctgctcgacagaatcgaaggcgccagcgacagcagcgaccataccaccagcaccaccggcagaatcatcagcgaccggcgattctcgcggccgcccaggcacgctttgatgccgtagtaacaaatcagcaggtagacggcgtacacccacaggggcgtgccttggaggatgtcgagcatggcgagcttccttgaagaaagacgttgtttattattgggtagggatcgtgtcagtagtgatagcggcacatcaggatctgtacttcatcatcctctatgccataaacgaggcgatgctctgcggtgattcgccgcgaccagaaaccgctcaggttatgcttgagcggttcaggctttccaacaccttcaaaaggatctctctggatggctttgatcagcagatttatacgctttaaccccgccttgtcgttctgttgaaaccagagatagtcgtcccagccttcaggggtaaagagtattttcattcctcgatcagcccccttggcttggctttaccggctcgcaagctgttgacggagttgatcagacgttcggcatttttaggtgagcgcagcaggtaggctgtctcttcaagggcattgaattcagataacgagatcatcaccacgggctcacctttttggcgcgtaagtaacagtgggatgtgatcttcgttgacgcggtccatcgtttcagccagatgagcgcgggcgttggtgtagttgatggtttccatgatgctgtcctcgtgtaatggcttgaacgtacagaaatacgtacaggtcttcaaggggcagcttatgaacggtcactgagtggcaataaccatggcggatacgcatcactactcaagctgcctcaagcacgcctccagaatatccaggccttcctccagcaccgcaggctcaatggtcagcggtgccagcaggcggatgatgtgccgcgacttgccgctgggcatcagcagcaagccggcctcgcgcgccaggctcagcaattgggtgagttgtttggacgcgggcgtgccgtcggcataggccagctcgatgccccgcatggcacccacgccggtcaagcgcccaaggaaaggcgataaaccttgcgcacgccaggcttgatagcgactgacgatggcctcttcctgttgcgccccccaggtgctcaggtgggcgtcggtcattgcgtccagcgtggccagggctgccgcgcaggcaatcgggttgccggaataggtgccgcccaggccgcctttgggcaggttgtcgagcagggttttgcgcccgaccaccgcgcccagcggcacgccgcctgcgatgcttttgccgagcaggatcaggtccggctcgatgcccaggcgcgagaaggcaaagcgttggccggtacggccgaagccggactggatttcatcggcaatcaacaggatgttcttttcattgcagaagcggcgcagggcctgggcgaactcgatgtccagggcgagaaaaccgccttcgccctggaccggttcgatgatgaagcaggcgacgtcttctacatcgatttccacgctgaacaggcggtccatggccttgagtgcttcggcacaggtcacgccgttatctgcgctggggtagggcaggtggtacaccgggcctggcagtacgccgaccttctgtttgtagggcgccaccttgccattgaggttgagcgtggccagggtgcgcccgtggaaggccccgtcaaacgcaatcacggcggtacggccggtggcgccgcgcacgattttcaaggcattttccgccgcttccgcgccgctgttggtgagcatgccgctgacggcgtagcccaccgggataaagtcggtcaggcgatccatcagttcgatgtagggggcgtgaggtgcggcgttgaatgcgtagtgggtcagctttgtcgcctgatcctgaatcgccttcaccacgccggggtggcaatgccccaggttgagcacgccgataccgccgacaaagtcgatatagcgtttgcccgtggtgtcccaggcctcagcgtttttgccatggctgaggctgatggggtgaacgatggaaatcgactggctgatggtttcgcggctcatgaatcggggactcggcaatgacgggcgtctttttatctaagctgcgccacgggcactgccgcaaacgaaataaagtcgccgggtcattattaaaagtcgggatgtgccttgatgtaacccaccatccagttcaggaaggctttgactttcgggatgtcaccggcgtgctcggcatgggcgataaagtgcgcgccggcgctgggcatcgtgtactgccaggggatggtcaggctgccgttggccagctcttcggccaccaggtactgcggcaccagcgccacgccatagcctgactgcgcggcgcgaatgcacatgtaaaacgtgtcgaaacgcggcccgtggtagctgttctgcgaatgcaggccctgttccaggaaccattcgtgccacgcttccgggcgcgaggtgcattgcagcagggtgtgacgcgatgaagcatcgctgccctcggcgacaaaccccggtgcgcacaccggtaccacggcttcgcgaaacagctcaatgcacgtcgcgcccggccatgaaccctggccgaagaagaaggcaatatcggccttggcttgcagcacgtcgaagggttccagttcgttgcgcacgtccaggtgaatgtttgggtgcctggcggcgaaatccttgagcttgggtaccagccagcgatcgccgaaggtcggctgagtggcgatgcgcagcacttcggtctcgccgccataggtgagaatgtagcggctggagatgtctacttgattgaggattttgcgcacttcggccagatacaacgcacccgccggcgacaggtacaaacgctggcgcacccgttcgaacaggttgtggcaaagcatctcttcaagctgcgccacctgtttgctcacggcactctgggtcaggtgcaactcttcggcggcgcgggtaaagctcaggtggcgggcggcggcttcgaagcactgcagggccgtcatcgaaggggtcaaacgtttcgaaatcatgcagttcattccaaacaggaaggagcctttgcctaaaggtcgtttgtggcaggcacgtaaagccgtcgatactgcccggcaacactataaaccggcgcgggctgtgcggcgccgaataataaggaatgacagggagtgcctcgcatgaaaaacctcaagaccaccttggccgccatcaccgccgctgccgccttgggcctggctgccagcgctcacgccggtgcgacgctggacgcgatccagaaaaagggctttatccagtgtggcgtcagcgatggcctgccgggcttcggcgtgccggacagcaccggcaagatgaccggcatcgatgtggacgtgtgccacgccatcgcggctgccgtgttcggcgatgcgtcgaaggtcaagttcagccagttgaccgccaaggagcgtttcaccgcgttgcaatcgggtgaagtcgacgtgatctcgcgcaacaccacctggaccagctctcgcgatgccggcatgggcctggtgttcaccggcgtgacctactacgacggcatcggctttctggtgaacaacaagctgggcgtcaccgccgccaagcaactggacggcgccaccgtgtgcctgcaggccggcacgaccaccgaactcaacgtcgctgactatttccgcacccacagcctgaagtacacgcccatcaccttcgacaccgccgacgaaagcgccaagggcctggagtccgggcgctgcgacgtgctgaccaccgaccagtcgggcctctacgcgcaacgcatcaagatggcccaccccgacgagttcgtggtgctaccggaggtgatttccaaagaaccgctggggcccttggtacgcaaaggcgatgacgagtggttcagcatcgtcaaatggacgctgttcgccatgctcaatgccgaggaaatgggcatcaactccaaaaacgtcgaagagcaggccaagaccaccaagaatccggacattgcacggctgttgggcgccgacggcgaatacggcaaggacctgaaactgcgcaaggattgggtggtgcagatcgtcaagcaagtgggcaactacgatgaggtgttcgaacgtaatatcggccagggcagcgtgttgaaaatcaagcgcgggctgaacgcgttgtggagtaacggcggcattcagtacgcgccgccggtgcgttgattactccgacactctgtccttgcctgccgccttggagcgatacagtgcctgatcggcacgcgccatcaaggtggcaggggtctcaccggcacggtgctccaccacgcccacgctcagggtgactttgaagccaacctcggcagggattttcgcaatttttttgcgaatcctttcggccagtgcctttgcgtcgtccagcctgcttttgggcaggatcaccataaactcatcgccgccccagcgcgccgccaggtcacccgggcgcatgcaaacgtccaggctttgcgccacgctgatcagcaactgatcgcccgtcgcatggccgtgccggtcattgactggcttgaagtcatcaatgtccaaggccagcagcgccagcggcaagcggaaacgttcggcgcggtcgcactcttgcagcagcactttttccaggcagtaccggttggcaagcagggtcagggcgtcgcgctcggccagggagcggttttcgtcaagctgaagttgaagttgctgattgacccgtgacagttcgcgggtccgctcagccaccaacgcttcaagggattgattgcggcgttcgagctgttcgatggagcttttgcgcaagtgaatatcgcggtgggcaccgaccatgcgcgccactgaaccgtcagggttgcgtgcaatcacgtaaccgtggtcttcaatccacaggtagccgccgttttccgtgcggcagcggtattcggctctgtaatggggggcacgctggctgatgtagtcatcaaacactttcatcacgcggggatagtcgtcggggtggatcacgctttcccaggtgtgcacgttgttatccagggagtggcgagggtagccaagcatcatgtaccagcccgggttgcggtacacaaagccggtattggcgttccagtcctagattccgtcgctgaccagttccatgacggcgtgcagcatgtctgaattgaggtcggaaaagtcattcctcaatgggctgtcatcagatgtatcgtccatcctcttgcttccctgcgtgcgctggctttgaaggccagtcttcgttgacgcccagactccgtggctgacgttactttacaacgggggcggctgggtttgaataggagggatgtgctgctttagtggggtacgggggagccattattttggcgcaatcattctcgtccttggctttccatccgcgttgtgctggtaaatcgcctctggctggcccctttcattgaaaaacacctggccgatccccgccgagttccacaaccgctctcccgcatgggcatgctcgggaatatgcggcacgacctccatggcgcggcggcgggtgaacccgttaagcggcgaacgcggtgagtagagccaacggttgaggcggtcaaaccactccagcaggcgcggggggaattcattcttgatgccgctgctggtgatctgccagatccgggggccggcgttgcggtggcggatcagcacttcatagacgaacgagtaatgcacgtcgccggagaggattacgtagttcccgggcgtgcgtgagtggcggaaaatgttgaggatcacctgggccgcgccgcgatgggccatccagttttcggcgtccaccagcagcgggtggccgcaccaactgaagaccttttgcacggtctcgatcagcttgacgccaaagaccggcgccggggagacgataatggccgaaggatgatccagcagtgcctgttgcagttcgctcaaggcttcccagtcgagcaggccggagggttgcttgagggtgaattcgctgcgccagcgccgggtacgtgtgtcgagtacaaccagcgcgggcgtggtgggcagtacgtagtgccattgctggaactgcaacagggcttcgatcagctcatcctgcgcggccgcattgagatgggcattttgcaccccggtcgtcagcgcccgggtttggcagacaagctcggcaaacacctgcggttggttaccccagccctgacacagcaggtaagcgagcaaggcgttgccgatgatgcgcttggaaaacgggtggccgtaggccgtttgctcccactgggcgctgaggttccagtcgtcggtgatgtcgtggtcgtcaaagatcatcagggtcggcagatgggcaaatacccgcgcaacgcccggctgcccgtcgcgaaagtgttcaacctgcacctgttcgcgggcatagcgtgcctgttcctcacgactcagttgcggtggttgcggtgtgatcagtgcccagggcgtgggcgaccacaccagcaagtacatcgcgatcacttcagccaatgtcaccaggtgattgtccgcagtgctgctggtgaaaatcggctttttcaccccgccgaaaaaccgttcgcgcaaggtctcgttgctgtccagtgccggcagcaggtcggcgcgatggtaatagctggcgcgatgcccgtagaggctggcgctgtcgtccaccacagtgccttccaggtattcgtcgaaaagccccaggcgcgcaatcagtgcgtgaatcgcccgcagcatggggcctgcgacatcgtcggcgtaaatctggtcgccgctcatcatcaacagggccgggcgttcggccggggtgcgcgcatcagccagcaggcggtcgacgcacagcaaaccttcgtcggcccggtgatggggtttgcggcaggaaccgtggaccagttgatggatacggctgtgcaacacgaaattcgggtagccggtatccgtgtgcaaaaggtgcggcgcccattcggctatgccgctgccttcggtcagcaggtcatagccgatcaccacgtcctgaggcagcgcgtcgtccagcggtacgtcaatcaaatgaatgaaggcgtggcgccccatcggcacgacctggcattggccttgatccagcatgatctcaatggtctggccttcgacgtacaacctgagcgtcaacgccagttcacggctgcccgccagccacagcaccaaacgccggggttcgagacggcgcagcagtggcccggcgaggacggcgggcagtgtgtcggcgtttggcatgcaggcaaaggttccaggcaggatcaaaccggcgaggttagcgcactggatgtcggcattttgttaagcggccgggctgcatctgtatcaaaagtcgtcgctggcgtttgcacactcactggctgcaggtgttgtcgcgccttccttgccttccaccacaaaggctgcgcgatgctccgccaccacgttacgcaatgcgctgtagtaatccggcagcttttgcaggctgtcggtgagcggcagcaacgacgcgcgcgtgtccacggtgccacccaccaggctgacagtgcccagggtttgtacggtatcgctgtctcccagtggcgagaccaggaagctcaagaccttgcccgccgcatcacggctgttgccggtgcccagcagcggcaactcgacaatcggcccattgccgacgccccacacgccaaacgtctggccaaagtcagcggtatggcgcgggatgcccaggcggtccgacacatcgaacagccccaccacgcccacggtggtgttcacagcaaaccggcccagggtgttgatcgaacggcgcgggttaccttgcagcaaatcgttgatgaacacctttggctcgctgaagttggtggcgaagttatgcacaccctgctggaaaaaatccggcaggtggcggtaaccccgtgccaccggggccagggcgtagtcatccacggcccggttaaacgcgaacaccccacggttgaccggttcggccgggtcatacaccgggtagctcacctgcgcgcattgggtggtgggcgccacgggcgtggggctggcgcagcctgtcaggtaagacacggtcaacagcagcaccgcctggcgggccaggtgctggggataagtgagcgagcgcatggtcagtctccgcaaaagggaggccgatgctggcagccgcttcttgcgcaaagatgtctggtttattgcgctgttgacgctttattgcacggttgaaatatatgacgcgccgcgccgaatggttttagatagcccctcgaccaacccatgtgatgtgttccggtgagcaaccttttgatcgtggacgatgaccttgaagtcctcgcgctgctgaagaaatttttcctgcaacacggctatacggtcgagaccgctgccagtggcgccggcctgtgggcggccatggagcgcgaaccggcagacctgatcatcctcgacctgatgctgcccggtgataacggcctgctgctgtgccagcgcttgcgccaggagtacgccaccccggtgatcatgctgaccgccatgggcgagctcagcgaccgtgtggtcggcttggaaatgggtgccgacgattacctgagcaaacccttcgacgcccgcgaactgctggcccgggtgcgcgcggtgttgcgccgagccggtgaaagccggctggcggtgggcgaggttgcccgcccgttgatccgctttgccggctggcagcttgacctgacgcggcgtgaattacgttcacccgaccacgtgatgatcccgctgtcctccggcgagttcgacctgctgctggtcttcgccgaacacccccagcgcgtgctcacccgcgagcaattgctgaacctggcgcgcggccacagccacgatgcgttcgaccgcagcatcgacgtgcaggtcagccgcctgcgccgcaaactggagttcgataccaagcgcccggcgatgatccgtaccgtgcgcaacggcggctaccagttcaccgccaacgtgacccgctcatgaggcgcctgccccgcgacaccgtggcgcgctggatcgccctgaccattctgctcgcgatgttcaccgcgctggcatttaacgccttgtttgtgcaattggccggtgtgtgggcgcggccgccgctgaccgaaatcgggttgctggaaaaaatcgccgtggtggtacgggcggtggaagcatccgagcccgcccagcgtgagcgccttactcaggcggtgggtgatgagcaattcagcgtgacgtgggcgacccagcgtgaaacatttggcttgcccgagcagcttgagccggattttcactccggcgatgaagttttcaagcatctgctgcccggcccgccccggttgatggccggctacgagccttccgactggacggacggcaaaggccactatgcgttggtcgtccggttggttgaccattcctggctgatgttcagcgcgcagtcgcgcagttggggcttgggggagggccagcgcagcctggtcgtgttgctgctggtgttagtctccaccgcgttggtgacgctggtggcaacccggcgcctggcgcggcccctgcaacagttcgcccagggcgcaaggcgctttggctcggactttcgtgcgccgcccatcgagccggtcgggccccacgaaattcgccaggcgatcctcgccttcaatggcatgcaggcgcaattgcagcacttcatccaggaccgcacgcaaatgctcgcggccatttcccacgacctgcgcgcgcccctcacacggttgcgcctgcgcggtgagttcattgaagacgccgaccagcaacaacgcctgtttcgcgacgtggatgaaatgcaggcgatgattaacaccgctctggagttcttccgcgatgacgcacgtctggaggaagccacccaactggatctggcggagctgctgcaaaccctgatagacgactaccgcgaccagaatatcgacatcagcttccgtggcccgccacggctggtgtatttcggccggcctctgggcctcaaacgcgtcatgaccaacctggtggaaaacgccatccactacggcttggcgcctgagatcgaactgctttacatcccgggcgaggtcgtcattcacgtgctcgaccgcggccccggtattcccgccgagcaccgtgaacaggtgttcctgccgttttaccggctggaaggctcgcgcaacaaaagcaccggcggtgtggggctggggctctctacggcacgagcgattgtgttggaacatggcggcacgctgaccctggcagaacgccagggcggcgggttggtggcgatgatcgtgttgcccgtctgacaaccggcgacagacggcggagtgtgaatgcgggcttgctgtggcgagggagcttgctcccgttcgattgcgtagcagtcgccagcttcaggggcgcttcgcaccccagcgggagcaagctccctcgccacacaagcccgctcccacaggttaaccgcgtcagatgtgtgaatcctcgatcaccttgggcacggtgaagcggaactcgctgccacggcccacttcactttcagcaacgatcttgccgccatgggcctgaacgatgccctgcgtgatatatagccccagcccgctgccggtagggttgttttcggtctgggtccagtagcggtcgaacacatggggcagttgctccggctcgatgccttcgccggagtcgcgcaccgaaaacacgatctcctcgccattgctcatggcgctgatgccaatattgccctggcgcggcgtgaacttgatggcgttgccgatcaggttcgacagcacctggaacagacgctcggggtcagcgtggatctgcagaccgggctcggtgttgaacgacagatcgatacctttttccatcgccagcggcgcgagcagggaataggcctcttcaaatatctggctgacatccagcttcaccggcttgaccacataacgcccggcctcgattttcgaggtgtcgagcaagtcttccagcagcacattcatccgcccggcggcttgctgcatggtatcgatggccgaggaaatgcgccgcgatgtgtgtgggccgtcggagctgaacgccttttgcatcatgccgcagagcatggagatgaccgtcatcgggttgcgcaggtcgtgggacaccaccgccaccaactcatcacgcgcacgcacggcttgctgctcgcgcaacacttggcgggccaagtcgttttccagcgccgagcggcgcaggtcgttggcggcaaacaggtcgccgtggctccacttgatggagataccggccatttccaccttccagatttcaaacgacgtgcgtgggcgaaggcgcaggccggcgtcggagttttccaggtccagcggcttgttcgggtcaccgctccagttgatgttttccttcacttccgggcggaaccacagcacgccgttgtccaccggcttgggcagactcatggccaatacgccgctggcgacctgttgaaattcggcggcaggcgggtagaccgacgacaggttgtggctggaaaacaccggctcgccggtttcgatcagccacttgtgcaacgcgcgaatctgcgcgggctccgggcaattgccgtaacggtgcagttgcttgtcttcgatgatcgccacgccgccggacagggtcaggtccagcagccactgcggttgttgagccaagccgtcgaatacgttgtcctcggacgctttcatcgcctgcgtgagagcggccagggtctcgactttttcttcgcgctggcggctcagttccaaggcttccatggcgctgatctgcaacgacagcacctggccgatggtttggcacgcggtgcgcaaaccgttcggcaccaacaagggctcacggttgccgcaactgatcaggccccagagtttgtcgcccttcatcagcgagatgctcatggacgacagcacacccatgttctgcatgtactggcagtgaatcggcgacacgctgcgcagggtggcaaagctcaggtccagcggcaggtcgttgtccgggcgcagcttgggcagcagcggcacgggctcgtaggccgcgttcgggatgatgcgcagccagttggtgcgatacagctcgcgggcttgctccgggatgtcggatgcggggaagaacaacccgttgaacagttccatggacggcgccgacgcttcggcgatcacctggccatggccttcgtcttcaaagcgatagatcaatacccggtcataaccggtcattgcctggatttcattcacgctgatttcgtacagggcttgcagggttttcgccgactgcaggcgctgcagcattttgcccaagtcgctggtgcgaccgttcagcgcgcggggtttgaagttctcaaggcgcggttcgaactccagcaccagcacatgttgatggcgatgcagcaggccttcgaactcggcgccgttgagcgtgacgtgcagcggcggcgcgtcgaagaacgtgttgttttcagccatggttttcacagccagggcatgttcggcgccgagcagcgtatgcaatggctggcccagcagcgcctcgggcgcatggccaaacaaggcgctgacgttggcgctgacctgcacgatgttcagctcgggctccgacagtgtcagcagcacgccgtggggctgaatcgcccccggaaagcggatgggctcgtcagcacagttggcaagcagctcttcaaaatcttcaggtttcatagcaatacctcctggcggtcgagccattgctcaaagccgctgaatgttgtgcgggcagcgtctaccgcgtgctgtctggcgtgcgcgtccagcggcaagcggcccaggtaatcgagaaagtctttccagcgtcttccggtttcggcgccatacacattgagaaacgcaccgccgttgtccgcatcgatacccaggcgctgagccatttcgcggcgcagcacctggccgcccagtgttgcgccttccagcacatagagggcgccgaggcaggcggcaggtgtgtcaaaggtgggcaggtcggaacaagccggcagggcgttgatggcgtcatcattcaggccgagggcgagcaggtcgcccaccagcgtcggcgttttcacacgcagcgcctgatcaaagccatcagggatcaagccactgtcgtacagcgccgcttccatcggcccataaaacccgtaatacgcctggagcaaacgctgataccaaccggtatcgaggcgctcggagaaaaacggcaggcgcttttccagcgctacatgcagcaggccggtgcctgcgcgcaacgcttccagtaatgagggcgcattaacgtcatgggcctgtgaatgcattcaatgagctcgaactgtgggcctttcggccatgaatgacgcgtggaaatgggcgacgattctacacaactcatggccgtcaactgtacgcacaaggcgaaaaggctgaccggcggatcagaaaagtcgctccttgcacctttaatgaccgcagggcatcgcttgaagttcggtttaagtgatatcgcagcgatatcagtgcaaagagccttgctgggtcagtgctgtttgcacgcattccagcaaatgttcggcgctccaaggtttgggcaggaaccgcacactgctgcccagttgcgccgccagtttggtgttgccggacgtcaacaccaccggcactgacggccagcgatgggccaccacccggctcaggtcataaccattgagcaaccccggcatttggatatcactgacaatcaggtctaccgggtcgtcggcccgctccagaaaaatcatcccttcatccgccgaagggaacgacgtgacgtgcgccccgaactcctccagtacgtccaccattaacgagcgaatgatctcgtcgtcttccagcactaaaatcgatggctgagccatgatccttactccaccatcagggttcatacaggttgagtggggcgcgattgcaagagtttcggcggtcaggatttttgccgatggatggtcatatagacgtgtttggcctgcggttgtcccgggaatccgggctttcaggttgctgggtttttgcgtttcatcaggaataaatcgtcgctcccaggcgttgtccgaaaaggggtgctgcaaccggcgccgaacttcctgaccctccctgaaaagaccgcgcctttgaaccgacccgtgctgcccatttcctacgaacacttggaccgctggattgcgtcgttgcaaccggcgctgctggacgaggcgttcacctgcgtcatcggtatcctgcgcggcggtgggccgctggcgttgatggtgtcccatgtgaccggcgtggccccggcatttctgcgctaccagcgcgctgaccgcagcgtggcctgggactcgtcgattccgattccgccgcccggcagcaccgtgctgttgtgcgaagacatcgccggcagcggccacaccctcaaggattgcgcccacttcctgcagcgtcagggcctcagggtgaaaacgctgaccgccggtttcgacgacctcagcgccacccgtcctgactacggcatcgacgggcgcggttacttcctgcaatttccgtgggagcgccaatcgcgcaccgccgcttaccgtgatcactggcaggaaacccttggagggcgcaccggtgagctggctcaggaccatgaatacgacgcctatgccatcgaccttgatggcatcttgttgcccgacattcccgaggcgcagtacaccgccgacctgcacgccgcgctgctgcaacgtgatcaactggcgcccttcgagcacttgcctgcactgggccccgtcaaagccatcatcaccggccgcccggaaatggaccgcgcccgcacgcaggcctggcttgaccgtcatggccacggcgacacgcaactgatcatgcgcgacaccacgcgctacagcgacacgcccgaacacgtcgcccaccataaagccagcgccaccctgcaattggcctgcactcatttcgtggaaagcgacccggtgcaagcaatcctcattgcgcagcaagctccgctgttacgcgtgatctggtgggacgctcaatcccggcaaggtcgtctgctcggtgcagcgcagtggggctgatacaggcataatcggcccactgttgcccgctgtggagcctttcatgaagtacgccttgctgaccctcgccctgatcctcaacaccgccccggccgttgccgcgggggatgccgaagcaggcggcaaactgttcagcaagacctgcggcggctgccacagcatcggcgaaggcgcgcggggcgggttcgggccggaactcaacgggattatcgggcggcccgccgggacgaccaccgactatcagtattccgacgcgatgaagaactccggcgtggtctggacgcgcgacaagctcgctgcctacatcgaggcaccgaagaaagtcgtcagcggtacgcgcatgattttctggggtatcagcgacccggagaaaattgaaaacatcctggcctacctcgaaaccttccagcccaaatgatcactcgcgcacgttcctgaacagcatcagccgcgcactctcgtgcagcccgcgtgtcagcccctgcaagcgttgaaactcctgcgggtgttgctcggccacatcctcccgaggcgtttgcgacgccaggtcgtgcaaggtcggtgagctgccgtcatgctgcatctgcaggaggaaatgctgagtcacgccaccgatgatcggaaaggtcccttcgtgcagcaccaacggcaccatgcgctcgccttccggcgccggttgctggatgtcccggcccatcgcgccgttggtaaacgggatgcccgccatgcccgctacggtcggcagcaggtcagccaggcccacggcctcttcgatcacccggggtgcaaggcccggcgcgtggatcagcagcggcacgttgttactttccaggcccagttgttcgaaggcgggcgccatgtgcgggatttggctgatacgcgtgttgtggtcgccgaagagcacgaaaatagtgttgtcgtaccagcctccagctttggcaatctccatcaaacggccgatgttgtaatccagcagacgcaccgcgttgtattgctcgacactgcgcgagccggcgccctgggcttgttccagtgtcacgttgtttaactggaaaccgtcgttttgtttggggatggtaaacggccggtggttgccggaggtttgcaggtaggcgaagaagggttggtccttggggaccgcacgcaacagttgatcgctttccttgaacaggtccagatcggaaatgccccacacgtccacccgtggcgagcgccagtggctttcgtcaaacagttgcacaccatcgatgctctggcggatcagcgcgttgatgttggcccaaccggcgttgccgccgatcatgtagaacttttggtaaccctcgaacgcgttgatcagcgtgtgttggcgcgtgatcagcgggttgcgcgtggcggtctcctggcgcgtgacgtccggcacgccggtgatactcgcccacacggttttcgcagtgccggtgacgggcacgtagaagtgcttgaagaacaggctttgcgtggccagtttgtccaggttcggcgtggggttcagcgggttgccgtaggcgccgaccgcgctggtgccgagggattcaagcatcacgaagaccacattgggtgggcgatcgcccgccagcctgtacggttgtacgccttgttcgcgtacgaaactcagttgctgggcgtcaggcttgtcgacacccaggtacttcgccacttgtggatacagtgtgcgtacctgagcctcatcgtattgcgactggccgaccttgagggtgtcgtacaaaaacagcaccgggttcaggccgacggcagcgacctgactattgccggaaaaaaacgcatcgctccaacgcaggggcaccgggttttccaggttcagattggccacgcggccgagcagggccaacagcacgacgaccacgccaacgacggagacagaggccactgtcagtttgccgatggccttgggctcgcggtccagggtcagtcgctccaggcagaccagcgcccacacccacaacgccacggccgccagccagcaggcggttatccacagcaccgggtaggtttcccacaccatctgttgagatatctgtgcgtcttgcaggtaacgcagcaccgtcgcgttgatgcgcacacccaggtaggcgtaatggccgaaatcgaggatgtacaccaagccgatcacggccagtgccaccaccagataaccgcgcgccagccagcgcaggacgggcagggtggtgaggttccagcgcggcagccaggccagcatgcccagcggcaacaggatcaatacagccaggcgcaagtcgaagcgcaggccgatgccgagggtgtccagcagtgccggggtgttcaggggcaagccggaaaacgccagcacaaataccagccgcaatgcagccagcaacacaaacaccaacccgatagcgcccacgccgtagcgcaggcggcgtgattgcaacgcactcattgttgacctctattcaatctcaaaaacaccacaagacccctgtgggagctggcttgcctgcgatagcggtgtatcagtctcagcctgttttcctgacacgccgccatcggaagcaaacctcttcccacagtttgaattgcattaacccagcgactacgcagtagatcgccagcagcggatccacgagatagtcccaatagttctccgacgccttaagccgcaacgcaaacgccagcgtgcccaccgccaacatccacgccgccagcccattacgcagccataaagccaccaacgccgccgccgccatcagcacaatcatcggccgagggttaaacccccaccgatacggatcgaaatacgtcagccccaacgtggccgggtacaacaccaggctcaacacgccaaacagcaccagcatctgcacccgatgcggccgctcaagtggctgcaccaaccccaaccgacccagcgccacccacgccaacaacaccaacgtgctgatcgccaagtcatcggtaaaactgcgcacatacgccgccagcgacagctcgtttatcgggatcacactcagcaccaccagcattggcagcagccacggtcgccagcgctcgttaaaccgaaacaggctcaacagcacaaaccccagcaacacaaaactcaaatgggcctgccataacgagatcatcacaaacgctccgacagccaggcttcgttgaagctgacgtgtttgataaaggtgttattccacgagtacaccaagtggtacatgccgtccgggctgcggctgaagtacgggtactcgtattcgaattcgcagccacttggcttgcagacgcggtagtccaggctgctgagaaaacgctcctccagcggcaagcgcagggcgccgcttgaggcgcgaaagccctcgccgatgatttctttataagcctcgggagtgaagggttgcccgagcgggtctggcgactggtccagctgcgcgacggtgtgccattggctcatagtggcgtcggtgccgtagaggctgagcttgaagcggccgtcttgcaggtcgttcagcgccaccagcaaaccgtcgcctctggtgccgactgccgcgagcgacgaattgggattggacggcgccagcggatacggctcgctccacgtctgccccgcgtcttcagtgcggctagcgagcacgcggtggtgggtcttaccggcgtagcgcagcatggcgatggcgcgggttccgtccagcggcacgatggtcggttgcagggaatgcttgcctcggctgatgcggaatttgtcgatcaccgcgccgtccgcgctgaggtacaggtactcggcaaacttgcccatgaactcgtgatacaccggcaggccgatggagccgtcggcatggaacaccggcgccgcgcgcaccagcgtgctgacattgaagaacggtgacgtcaccaattgccggggcgccgaccagctcgcgccgaggtcatccgacaccatcacattgatcgcgctggcggcccaaccgccgaccgacaccgacacataaaacatccacaggcgtttatccggggccagggcgatgaccgggttgcccagcttgcggatgtagcgcccggtgccatcgcgcgtgctttcgcgggtggccaacacctgttcggcgccccattcgctggcgcgcgcatcaaaccgcgcggtgcgcacctgcacatcggcggcgccttcgcgggaaccggcaaaccacacggccatcaagtcgccaccgggcaaggtggtgacggaggaagagtgcacaaagtcggtgagggtcgaagacacaaaacggctggtgtattgcggcgcgtcggccaccttcgaggtgttcgggcctgtttgggcaaatggcgccagcacgtggggcggatggcttagccaggcggcagtaaaaacgccgagcaagctgatgatcagtagggcggagcgcatagggaacctgtccgggaaaaggattactgcgcacgttcatccggcaggcgcttcctgcgaccggtgagcatggataacggcaggttgtccttgacctgaatactttcaaacagcgctgccgaaacatgcacgcagaccagacccagcagcacattggcggcggtctcgtggagttgcagcggccagtccgcgccccacaaggcgtcgacttcctgcatcaggaagccactgatgccaagggtcagcagcgccgacaacatcaacagcatcaccagcgcacccagaggggaatggcccaggcgatgctgcggcctacgattaagcagcgaacgcacgtgggccttgagccgcgccggtgtaggccaaaagtctgcccagcgcgcactgcgcggcccgacaaatccccacaccgtgcgtagcagcagccaggccatggcgtagtaacccagccagacatgccagtcgtcgccggcttcattgaagaagtaattggcgacaaagaccccggcgatcgacaagtgaaacagcctcaccagcgggtcccacaggcgcagggagttgcctggcatcagcccttgatctcggtcttcacggctttgccggtgaccggatcgtggtagatctcgaccttgcgcttgtccttgtcgaagccgtagatctcgtagcagttaccgtcggtgaccttgaacttgctgatcgtgtagccgtcggccttgagcttgtcctggaaggctttttcgtcttgccattgcgagcgctcggcggtggtgcactgtgggccggcgagggccattgggctggcgataagcagagacagcaggagaattttgcgcatggaaaagctctcagcagaggtgggagatttcacagtgcaaaaccaaccttagcgcaaccttagttggcaacgcgccgtaacatctttcccggaatagccgacgcgggaacccggcatcatgccgccgtttcctacagagatttctccatgcgcctactcctcgtcgaagatgaccgcgcccttggccaaggcattcgcgtggcactgggcgccgaaggctacacgctggattggctgcaagatggcctcagcgccttgcacgccctgcgtactgaaaatttcgatttactgctgctcgacctcggcctgccacgcctcgacgggctagacctgttgcagcaactgcgcgccgggcaacacgacctgccggtgctgatcctcaccgcccgcgacggcaccgccgcgcgcatcgccggtctcgacgcgggggccgatgactacctgatcaaacccttcgacgtcgaagaactcaaagcccgcgtgcgcgccctgttgcgccgcagccagggccgcgcgcaaccgatgctcgaacacgccggcatcagcctcgacccggccacccagcaagtgcgctatcaagaggaagacatcgtcctcacccccatggaataccaactgctacaccaactgatggtgcgccccggcaaagtcgtgacccgcgagcggctgtcgcgcacgctgtatggctggcaagaccgggtggagagcaacaccttggaggtgttgatccataacctgcgcaagaagttatccaccgaactgatccgtaccgtacgcggcgtcggttatgtgctggtgcttgaaccatgaactcggttcgtgcgcgcatcctcatccccgtgttggtgctgatcctgctcggcgacgccctcatcagctggctggtgctgcgtgacagccaccacgaaatagaagaagtctacgacgcccaactcgcccaaagcgcccgcctgttgcaaggcgtgctgcgccagcgcgaccccggtgacgcggattggtcgcgcttgtatgaggcgttcgaccaggccatgagccgcgtcggcgaggagggtgtggcccacccgtatgaaacccgcctgacgtttcaggtatggcgcagtgacggtgagttactgatgcgctctgccgaagccccggtgctcgccgcgccgcccaccaccctcggttcccacgacctgatggacagcggcaatgactggtgcgcttttttgttggccgacccgcaacaggggctgttgatctgggtgggcgagcgcgacgacatccgccaggacctcatcgaacgcatcgtgcgccacaccctctggcccagcctgatcggcgtgccgctgctggccctattgatctggctgaccatcggctggggcctcacccccctgcgcgctatggtgctgtccatccgtggccgcaacaccgacaccctgcaaccgctggccctcaagccgctgcccaccgacctggaaccgatgcaaaccgcgatcaatcggctgctggtgcagatggatgacctgctggaacgcgaacgccgcttcatcgccgacgccgcccacgaactgcgcacgccgctggccatcctgcgtatccacgcacaaaacgcccaaagcgccgcgaccgaagaacagcggcgcgaagccctggactttctggtgaacggcgtagaccgcgccacgcggataggcagccagttgctgaccatggcgcggattgaaccgcacctgagcaacccagtacgcaagcgggtgcaactgacggaattagtgcgcgaggaattggccgagttgacgccgctggcgatggagaaaggcgtggagttggtgctggaaggcgaggaggaatgctgggtggagaccgagccggtggcgttggcgattgcgttgcaaaatctggtgacgaacgcgctgaatttttcgccggaggggggagaggtgagggtggtgatgggcgcggactgtttgagtgtggaggaccaagggccggggattgatgaagtggaaatggagcggttgttcgagcggttttatagccgggggaatgccaacggggcggggttgggattggcgatagtggagatgattgtggggaagattgggtgcaggttgaggttggggaatttggagcggggtgggttgtgcgcgcggttgagctttacggcgtgcgcggtggagccatcggaaaaaccacaccgttgaaggtgtgggtgcagcagtcgcaaaacggcttcatctgctcgggcgtcagttgagggtttaccttttgcagcaggcctgtttcgtcgacccataagccgctgaaataggcggattcaccggtccccacatattccttcttatcgcattcatgcagcgcaaccatccagaatacgggctccgggcgatcgaggcgggcgttggcttcgctgaacaccttgtcccacggctgaccaactttggccaggaggaatcggaatagcggcgtgtagtcaaaaccgtgtcgttggtggctgtgcattgagccgcgggtggccagtgagttcttttcacttttggtgtgccgttcatagcgataagcgcaaaaactgccatggtgcacaccatgggtccgggtgttgacggagcggtagaggaggggctttttgattgtgggcctcattgcatcaggactcctttttgggttgtttggatggtggtggccaggcgccttggtagcgaaaggaaatttgatagtcgtaaaggctgggcactattaagtgctggaaatggggttggaggattgctatccaacccgggagtacattaaaaacgtctgcatatattgcggtctcattgctcaagcccagtgcttcaaaagaactgtctgcgtcgtcgatatctggtgagtactcatccgcttttaagtcattgctgtgtttttcgtaccagcgcaatctgattttcatggtcattttttgcacacctttctgtcgctgaaatcgacattttggatttttcggttattgaaactactaggcgtcgcacgccaaatacagcgacgcattttttggaagatccaatgaaataagtttttcaattccttcaatttgttgaggggtaagcaggtagtcatagacacattcgtgttcgtcctcccaacccataatcggcagcaaatcggcagctttcaggttgagcggaatttctgtcgaaatattctcgcttcctgatgggaccacgtagattaggtgtttcacggatctacccttctcttgtcttctgcgttcttggttcgttcacctgttattgggtcgaactcgcccaagtgtttgcctcgcttgttgtacttctcgaccttgcctcgttcgaagtcccattcgtagatatagccgttgggctctttccagcggggcctgagcttgcctcctcctttgactccggacttggagggggcgcgaacggcctccggaaaggcagttaaaaacgttgggctcgggtgatacttgtggtccccaggccgaacgctaaccaccacatacagcgaccgaacccccgactccaccgggaacaccagaataaaatcccgatactccggcggataaaccgggttcaccagaatctgcgccgccttctccgtcggcgggtaaatccacatcaccggcgcttgcggcgcagcctccaaggccggaatcccaagggtgtcccccggatcaaccgcaggcgtccagatcagctccgcgccttcacccaaatccgccacaaactgatcgccacggcgttggaactgcaccacatcaatcatctgccaatcagcatggttgcccgtataaaacccataccccttgagcgtgccgtcctcaagctgctcaacctgcaaccgcatctgcgaccgcgctcgttgcattgaacgcagctgctcctcgctgtagagcgcgctgtcgcccagctctgagggccaaaccagcgccaccaagcccatcagcaacccaccggcgactgtgccagcagcggtggctgccgactccacgaccgccgtacgcaatgccaactgccccaagccaacgggcagagcactgccactgatcttgcgcagagcgatcgcgccctcgctatccacctcgcgcccacccaacaggctgaaatggccgtagtccttgatcagctccagcggtacgtaaccggtggggttggtgtagtgaatgatgccgtcgggcagttggcagggtttggtgaaggtgcagccaggaagtatggcgggcgcaggttttggggcgggtgtgggcgtgaatggattgatcggcggtgaataggacacacgcggcggttgccggctcaggattcggcgcttgagcttttcttcttcggtgggagggtaaaagcgttctgacatgaccggctcacttccttgtgctgggggggagtgagcgtacgagggcggattggaagctgatgtcggctttgttcgatggtgggtgtgggaaagggcgtctgaatcctcaggctttctagaaggggcagttacgcgagcttatccgcgtgttcggatcttcagccttggcagtgaaagagaccttgggacgccaaggtctttttttgcctgctgatcagctcagcaggtgcctggaaatgatccgggagatttcgacgatcgaggtcttgccggtgaattcgaacttcactttgcccagcgacgaaaagtaaatctccagctccgagtccaggtcaaacgtgccggacgtttccaccgaatacgccacgatatttttgtaaggcagcgaggtgaagtccttcttgctgccagtaatcccctgcacattgacggcgatgatgcgtttggtggtgaacaccacgccgtcgcgcatggctttgtaggcgtcgatcacttcttcgccgtcgagcagcagggccgagacgcgttcggcgtattcgttgttttgtttgagcttgaagaagcctttgttgttgaagtcgatcatgggcctgcctcttgggtgtatgccgttttgcgggtgaatctgtatctaacggccggcttttcaacaccctaccatggccatctgcacaacaaatcaggagcacctttcatgcccgaactgtccagcttgcttgcctacggcctgatctccctcggcatggtgctcacgcccggcccgaacatgatttacctcatttcgcgctcgatttgccaggggcgcacggcgggtttgatttcgctgggcggcgtagcgctggggtttgtggtttacatgctgtgtgcggcgttggggatcactgcgttggtgatggcggtgcctttagcctacgacgcgctgcgaatcggcggcgccttgtatctgatttatctggcgtggcaggcgctcaagccgggtggacgttcaccttttcaagtgcgggatttacctcaggacagcccgcgcaagctgttcatgatgggtttcgtgaccaacctgctgaaccccaaggtggcggtgatgtatttgtcgttgctgccgcagttcatcgacccgaacggccatggcagtgtgctgacgcaatcgttgatattgggcttcacgcagatcgcaatcagcgtgagcgtcaacgcggtgattgccctcatggcgggctccatcgcggtgttcttcgtcacccggccgaaatggcaggtggtgcagcgctggctgatgggctcggtgttgatggggctggcggtgcggatggcggtggaggggcggcgttaaaggatggctttcaggtaatccttgagtgcgtggagtggggcgttgagttcttccagtgtcgatgcgtggcgcacatccaccgcaagtcgttgcagctcgcgacccatcacggtactggcgccgcccaatgattcgagcgccaacgtcaggcactcatccagcttcctctgaaccccagccaaatccccctgacgcaccagcaacccaaacacttcccgctcatacccatccatcaccaaatcatcccgcagaatcgggctcgcgccttcggtctcatgcaccagcttgagagcaaaaagcgcaacagcttccagcgtcaattccatggtcccggctcctcagtttctgcgttcgcctgcgcagtctcacttttctgcaggcgaaaaaaaagaccttgaatttcaaggtctttttttaagatggtgccccgagggagactcgaactcccactcctttcgaaaacggattttgaatccgccgcgtctaccaattccgccatcagggctcaatggcggcgaagtatagagatgagattaccgttggtcaatcacgtttcatggtctattttcactatttccgctagacttcccggccctgctagacgaaccccatcatgcgcgttgctgactttacttttgagctccctgattcgctgatcgctcgccaccctttggccgagcgtcgcgccagtcgactgctgaccctggacggggtgagcggtgccctcgcacaccgtcaattcactgatttgcttgagcatttgcgcccgggcgatctgatggtgttcaacaatacccgggtgattccggcacggctgtttggccagaaagcgtccggcggcaagctggaaattctggtggagcgggtgctggacagccatcgcgtgctggcccatgtgcgctccagcaagtcgccgaaaccggggtcgaacatcctcatcgacggcggtggcgaggccgagatggtcgcgcgctatgatgcgctgttcgaactcaagttcgccgaggaagtgttgccgctgctggagcgcgtcggccatatgccgctgcctccttatatagaccgccccgacgaagactcggaccgcgagcgctatcagacggtgtactcccagcgcctcggtgccgtggccgcgccaaccgccgggctgcatttcgaccagccgctgctggatgcgattgccgccaagggcgtcgaaagcgcctatgtgaccctgcacgtgggggccggcacgtttcagccggtgcgtgtggataacatcgaagatcaccatatgcacagcgagtggctggaagtcagccaggaagtggtggatgcggtggcggcgtgcaaggcgcgcggcggtcgggtggttgcggtgggcaccaccagcgtgcgttcgctggagagtgcggcgcgcgatggcgtgctcaagccgttcagtggcgacaccgatatctttattttcccgggccggccgttccatgtgatcgattgcctggtgaccaacttccatttgccggaatccacgctgttgatgctggtgtcggcctttgccggttacccggagaccatggccgcttatcaagccgccatcgccaacgagtaccgttttttcagctacggtgatgcgatgtttatcacccgtaacccggcgccgcgcggccctgaggaacaatcatgagtcgtatgtcgtttgaattgctggccacggatggtaaagctcgccgcggccgtttgaccttcccacgtggcaccgtcgagaccccggcgttcatgccggtgggcacctacggcaccgttaaaggcatgatgccgcgcgacatcgtcgccaccggcgccgagatcattctcggcaacaccttccacctgtggctgcgcccgggtactgaagtgatcaagaagcatggcgacctgcatgacttcatgaagtggcaaggcccgatcctgacggactccggtggtttccaggtgttcagcctgggcgccatgcgcaagatcaaggaagagggcgtgaccttcgcctcgccggtggacggttccaaagtgttcatgggcccggaagagtcgatgcaggtgcagcgcgacctcggctccgacatcgtgatgattttcgacgagtgcacgccatacccggctgacgaagacgtggcgcgcgtttccatggagttgtcgttgcgttgggcccagcgctcgaagaatgcgcacggtgacaacacggcggcgttgttcggtatcgtccagggcggcatgcacgaaagcttgcgcaaacgctcgctggaaggcctcgacaagatcggctttgacggcctggccatcggcggtttgtcggtaggcgagcccaagcacgaaatgatcaaggtgctggattacctgccgggcctgatgccggctgacaaacctcgttaccttatgggcgttggcaaaccggaagatctcgtagagggtgtgcgccgcggtgtggacatgttcgattgcgtgatgccaacccgtaatgcccgcaatgggcatctgttcatcgatacaggcgtgctgaagatccgtaacgcgttccatcgccatgatgattcgccgctggatcccacctgtgactgctacacctgccagaacttctcgcgtgcttatctgcaccatctggacaagtgcggggaaatgctgggtagcatgttgaataccatccacaatttgcgtcactaccaagtcctgatggctggtttgcgcgaggctattcaacagggtacattggccgccttcgtcgatgccttctatgccaagcgcgggctccctgtgccgcccttggactgagttttccgaccctaagattcactatttgcaactggagtgctaaatgagcttttttatctctaatgccatggctgacgccgctgcgcctgccgctgccggcccaatgggcggtggtttcgagtggattttcctggtcggcttcctggtcatcttctacctgatgatctggcgtccacaggccaagcgcgccaaagagcagaaaaacctgctgggcagcctgcagaaaggcgacgaagttgtgaccactggcggcatcgccggcaagatcaccaaggtttccgacgctttcgtggttctggaagtctccgacaccgtagaaatgaagttccagaagggcgccatcgccgccacgctgccaaaaggcacgctcaaagcgatctgagtaacaacctttaccaatcgacggggcgcgcaaggcgccccgcgttataagcgggcggcgtgatgctgaacaaataccctctgtggaaatacgtactgatcctggcggtgctggcgatcggttttatttattccgctcccaatctctatcctgatgaccctgcgatccagatcactggcgccagcacttcgctgcaagtcaatcaggctgacctggagcgcgcgagcaaagcgctcaccgacgcgggtatccaggttaaagcggcaacgttggcggctgacgcgaagggcggcttgttgcgcctgaccaaggcagaagaccaattgccggccaaagatgtcgtgcgcaaggccatgggtgatgactacgttgtcgcgctcaacctggcacagaccacgccaaaatggctgcgcagcattggcgcgcacccgatgaagctgggtctggacttgtccggtggtgttcacttcctgctggaagtcgacatggacaaagccctcgacgcacgcctgaaagtctacgaaggcgacgtgaagagcctgctgcgcaaagagaagttgcgttatcgcagcctgccgcagctcaacggtgccatccagctgggcttctctgacgaagcttcacgcgaacaggcccgtgccctgatccgcaagaatttcaatgatttcgacatcgtaccggctgacctgaatggccaggctgtactgcgtctggcgatgagcccggccaagatcgcggaaatccgcgaatactccatcaagcagaacttgaccacggtacgtaaccgcgtcaacgaactgggtgtggccgagccgatcgttcagcgccagggtgccaaccgcatcgtggttgaactgccgggtgtacaggacactgctgaagccaagcgtatcctgggtaaaaccgccaacctggaattccgtctggcggccgagccgggtgctacccgtgccacttccgaagagtttgagttccgcgaaggcaaccgtcctccagcgctgatcgagcgtggcttgatcatcaccggtgaccaggtgactgacgccaaagccggtttcggcgagcacggtacccctgaagtgaacatccgtctggatggtcacggcggcgaactgatgagccgcgccacgcgcagcaacgtcggtcgcagcatggcggtgatcttcatcgagcagcgcccggttaccacttacaccaagcaagtggtcgacggcgtcgagaaagatgtgccggtgcagacctttaaagaagagaagaagatcatcagcctggcgaccatccagtcgccgctgggtgcgcaattccgcatcaccggcctgaacggccagggcgaatcctccgagctggcgctgctgttgcgtgccggtggcctggctgccccgatgtacttcgctgaagaacgtaccattggcccgagcctgggtgccgacaacatcaccaagggtatcgatgcagctttgtggggcatgctgttcgtgtcgctgttcatcatcgccatctaccgcttcttcggcatcatcgccaccgtagccctggcgggcaacatggtcatgctgctggcgctgatgtcgctgctgggcgctacactgaccctgccaggcatcgccggtatcgtgttgaccatgggtatggcggtagacgccaacgtactgatcttctcgcggatccgtgaagagatcgcggcgggcatgactgtacagcgtgcaatcaacgaaggcttcggccgggcatttaccgcgattctcgactccaacctgaccaccttgctggtcggcgggattctctttgccatgggcaccggcccggtcaaaggttttgcggtgaccatgtccctcggtatctttacctcgatgttcacggccatcatggtgacccgcgcaatggtcaacctgatctttggcgggcgtgacttcaagaagttgtggatttaaggggctgccatgttacgtacaatcaacttcatgggcgttcgcaacgttgcgttcggcttcaccatgctccttaccgttctggcgttgttcagctggttccataagggcctgaactacggtctggacttcacggggggtacgctcatcgagctgacttaccagaagccggccgacgtcaccctggtgcgcggcgagctggtcaaggccggctaccacgaagccatcgtgcagagctttggtgcaacgaccgatcttctggtgcgtatgccgggcgaagacccgcagctgggtcaccaggtagccgaggccttgcagaaggtcggcggcgacaacccggcgtcggtcaagcgcgtcgagttcgtgggcccgcaggtgggtgaagaactgcgcgaccagggcggcctcggcatgctgatggcgctggtcggcatcatgatctacctggcgttccgctttcagtggaagttcggtgttggcgccatcgtctcgctgatccacgacgtgatcgtgaccgtgggtatcctggcgtacttccagatcaccttcgacctgacggtgttggcggcggtgctggcgatcattggttactccctcaacgacaccatcgtggtattcgaccgggttcgtgagaactttcgcgtactgcgcaaggcctcgttgatcgagaacatcaacgtctccactacccagaccctgctgcggaccatggcgacgtcgatctccaccttgctggcgattgcagctctgatgatcttcggtggcgacaacctgtggggcttctccctggcgctgttcatcggcgttctggcgggtacctactcgtcgatctacatcgccaacgtggtattgatctggctgaacctcaacagcgaagacttgatccctcctgccgctaccggcaaggaggtcgacgaccgcccgtgatgggtgtttgttgatctgctgttacaaagaaggcgcgagtattgaactcgcgcctttttttttgctccaaggctgggtatagcgcggacgtttcagtccgcttgtgatggtcaggaggttcacgtgaacaagtcgttactggttggtgcggtattgggtgctgtcggtgtgactgccgggggtgctgttgccacctacagcctggtaaaaagcggccctgagtatgcgcaagtgctggcagtgcagccggtgaaaacccagataaaaaccccgcgtgaggtctgcaaggacgtcaccgtaacccggcagaagccggtgcaggatcaacatcaaatcgtcggcaccgtggtcggtgcgctggctggtggcctgttgggcaaccaggtgggtggtggtaacggcaagaagctggccactgtagctggcgcagtcggtggtggttatgccggtaacaaggttcaggaaggcatgcagaaccgcgatacctacaccacgacgcagcagcgttgcagcactgtcaacgacatcagtgacaaggttgtcggctatgacgtgcgctacaacctggacggcaaggaaggttcggtgcgcatggatcgtgatccgggtggccagattccagtcgataaggaaggccgtttgattctgggtcagaaccagcagtaagtctggcatcaatccaagtgtgggagctggcttgcctgcgatagcagtgggtcagcaacctattagctagctggcagaccgctatcgcaggcaagccagctcccacattcgattgtgttggctgctgcggtaccaaatcccaggcataaaaaaagcacccccaggggtgcttttttgtgctcgctcgcttagcgcttcagcgaagccggcaggtgcggctggatagccgtcagtactgctttaaagcatttggtgttaccggcaaccacgtggcctttttcaaggaagtcgtgaccgccggtgaagtcgctcaccaagccgcccgcttcttgaatcagcagcgcacctgcagccatgtcccactcggacaggcctgactcccagaatgcatcaaaccggccggctgcaacgtaagccaggtccaggctcgccgcgccggcgcggcggatgccggcggtctggccaaccagggcgcggaacatgcccaggtagttctccaggttgtccatctggtcgtcacggaacgggaagcctgtgcccagcagggcgccgtcgaggctggtgcgaccgctgacgcgcaggcgacggccattcagttgggcgccacgaccacggctggcggtgaattcttcctggcggactgggtccagaacaacagcgtgttccaggcggccacggtatttgcaggcaatgctcacggcaaaatgcgggataccacgcaggaagttggtggtgccgtccagtgggtcgatgatccacaggtagtcttcgccttcgccgctgcctttgtgcaaaccggtttcttcaccgaggatgccgtgggtagggtaggccttgcgcagagcgtcgatgattttctgttcggcggcgcgatccacctcggatacgtaatccttggcgtctttttcgtcgaccttgatggtatccaggcgctcgatggagcggaagatcaattcactggcgctgcgggcggcgcgcagcgcgatattcagcatgggctgcatggatgtgtcacctaaggttgttaaagaaagccgagcattctagcagaaactttcttcaggtgaaggacgacgttagctttcatggcataaccttaggctgttctgtaagatttgctcccctttcccgtgtccgagagcgcctcccttgctgcaaaacattcgtgtcgtcttggtcaataccagtcatcccggcaacatcggcggggtggcgcgagccatgaaaaacatggggctgacgcgtctggtgctggtcgacccgcgcgtgttcccgcaccacgaggccgatgcccgtgcgtccggcgccaatgacttgcttgaaaaagcccaggtcgtcgccactttggaagatgccttggtcggctgcaatctggtgcttggcaccagtgcccgcgaccgccgcatcccctggccactgctggacccgcgtgaatgcggtaccaaagtcgtggaggaagcggctggcggcgccgaaatagccttggtatttggtcgtgaagattccggcctgaccaatgaagagctgcagcgatgtcattaccacgtgcacattccatcagaccctgagttcagctcgctgaacctcggtgcggcggtgcaggtgttgagttatgaagtgcgcatggcttggctggcggcacaaggtcagccgagcaaggtggaaaaggacgaggttgcctcgaccaaaagtggcgagttggccaccatggacgagctggagcggttctatgagcacctggagcaaaccctggtggtcattgagttcctcgatcctgaaaagccacggcacttgatggcgcgcctgcgtcgcctgtacgggcgcagctcggtcagccgggcggaaatgaatatattgcgtggcatcctcacggaaacccaaaaagcggcccgtggtgagcttcttaagcggaaggattaaaaatgttcgagcgtttgcgagaagatatccagagtgttttccaccgtgacccggcggcgcgcaacgcctttgaagtgctgacctgctacccgggcatgcacgcgatctggattcaccgtctgtccggcgccttgtggggcatgggctggaagtggctggcgcggttggtgtctaactttggtcgctggttgaccgggatcgagattcacccgggggccaaggtggggcgtcgcttctttatcgaccatggtatgggcattgtcatcggtgagaccgctgaaatcggcgacgacgtgaccctttatcaaggcgtgaccctgggcggtaccagctggaacaagggtaagcgccacccgacactgggcgatggcgtcgtggtgggggcgggtgccaaggtgttggggccgttcacggtcggtgcgggcgccaaggtcggttccaacgcggtcgtgaccaaggctgtaccgcctggtgcgactgtcgtcggtattccggggcgcatcatcgtcaaacctgaagctggcgacgagcaagaagccaagcgcaaggccatggccgagaagattggttttgatgcttatggcgtcagcgaagacatgcccgaccctgtggcgcgcgcgattggtcaactgctcgatcatctgcaggcggtggatggcaagctggatggtatgtgcggcgcgctgaaagacctcggcagcccttactgtgcgaaagatctgcctgagctgcgcgaagaagacttcgccgagatcaaggacgaagccgccgccaccaaggctggctagatcttaaggtcgcaaaagtctcctgtgggagctggcttgcctgcgatagcggtctgccagccaccccttgagccactgatccaccgctatcgcaggcaagccagctcccacatttgatctccattggtcttgagattgcggccaggtcctgttcccgctgttccatcccaccccatcctgctatgattcgcgcgccctttttacgggtaatcctgactaaagtactaggtcttatagttgacttaaatactcgggaatcgcatacttgctcccattctgaaacaccttggtacttgtccatgagactgactacaaaaggccgatacgcggtgaccgccatgctggatctggctttgcacgcgcaaactgggccggtgtccctggccgatatctccgagcgccaaggcatttccctgtcctacctcgagcaactgttcgccaaattgcgccgcagcaacctggtgtccagcgtgcgtgggccaggtggcggctatcagttgtcccgcgacatgcagggcatccaggtcgctcaggtgatcgatgcggtcaacgaatccgtcgatgccaccaaatgccagggtctgggtgactgccatgccggcgacacctgcctgacacaccacctgtggtgtgacttgagcctgcagatccatgagtttttgagtggtatcagcttggctgatcttgtgactcgccgtgaggtgcaagaagtagcccagcgtcaggaccagcgccgttgcaacaccaaggcgccgcgtctggacaagattgaagcgtccgccgtcgagtgacagccgaagagctaacggcacgccagccagcctgatttaggagaaagtccatgaaattgccgatttaccttgattactctgcgaccaccccggttgatccgcgtgtcgcgcaaaagatgagcgaatgcctgctggttgacggaaacttcggcaacccggcctcccgctcccacgtattcggctggaaagccgaggaagcggtcgagaacgctcgtcgccaggtggctgacctggtgggcgctgacccgcgtgaaatcgtctggacctccggtgctaccgagtccgacaacctggcaatcaagggcgcggcgcatttctatgcgagcaaaggcaagcacctgatcaccaccaagattgagcacaaggctgtcctcgacaccatgcgccaactggagcgtgaaggtttcgaggtcacctacctcgagccaaccaccgacggtatcgtcactccggccatgatcgaagccgccctgcgtgaagacaccatcctggtttccgtgatccacgtgaacaacgaaatcggcaccatcaacgacatcgcagccatcggcgagctgacccgttccaagggcatcctgctgcatgtcgacgctgctcagtccaccggcaaggtcgacatcgacctgtcgaaactgaaagtcgacctgatgtcgttctctgcccacaagacctacggccctaagggcatcggcgcgctgtacgtgagccgcaagcctcgcgttcgtatcgaagccaccatgcacggcggcggtcatgagcgcggcatgcgttcgggcaccctggcgacccaccagatcgtgggcatgggtgaagccttccgcgtagccaaggaagacatggctgccgaaaacgtgcgcatcaaggccctgagcgatcgcttctacaagcaggtcgagaaccttgaagagctgtacatcaacggcagcatgactgcccgtgtaccgcacaacctgaatttgagcttcaactatgtcgaaggcgagtcgctgatcatggcgctcaaggacctggcggtttcgtccggttcggcctgcacctcggcttcccttgagccgtcgtacgttctgcgcgccctgggccgcaacgacgaactggcacacagctcgatccgctttacgttcggccgcttcaccaccgaagagcaagtcgattacgccgcgcagaaggtctgcgaagccgtcaacaagctgcgcgttctgtcgccgctgtgggacatgtacaaagacggtgtcgatatttccaagatcgagtgggcggcacactaactatagaagccgccaccccagctctgtaggaacgtggcggaaaacgcaggcgtttctacagggttccagagcggccctgatgagtgaggattcagtaccatggcttacagcgaaaaggtcatcgaccactacgaaaacccgcgtaacgtcggcaagatggacgcggaagacccggatgtcggcaccggcatggtcggcgctccggcgtgcggcgatgtgatgcgcctgcagatcaaggtcaacgacgctggcgttattgaagacgccaagttcaagacctatggctgcggttcggccatcgcctcgagctccctggcgaccgaatggatgaaaggcaagaccctggatgaggctgtgactatcagcaacacccagctggccgaagaactggccctgccgccagtgaaaatccactgctcggtactcgcggaagacgccatcaaggcggccgttcgcgactacaagcagaagaaaggcttgatctaagcatttggcgacgagtaaggagtcaacgatggctatcagcatgacagaagcggcagcgcagcacattcgccgctccctgaatgggcgcggcaaaggtgaggggattcgtctgggtgttcgcaccacaggctgttccggccttgcctacgtgctggagtttgtcgacgaggtggttgcggaagaccaggtgttcgaaagtcacggcgagaaagtgatcatcgaccctaaaagcctgacctacctggacggcaccgagctcgacttcgtcaaggaagggttgaacgaaggtttcaagttcaacaaccccaacgtgcgcggtgaatgtggctgcggcgaaagcttcaacatctgaggctattcgtgggtactccttgtcatttcgctttattcgagctgcagccgagctttcggctggaccttgagcagctcgccacgcgctatcgagaattggcgcgtggggtgcatccggaccgttttgctgacgcttccgagcgtgagcagcgtgtggcgctggagcgttcagccagcctcaacgaagcctatcagacgctgaaaaacccgcccaaacgcgcgcgttacctgctcgcgatgaaaggcggcgagttgccgatggaggtcacggtgcacgacccggacttcctgatgcagcaaatgcagtggcgcgaagaactcgaagagttgcaggacgaggccgatgtggcgggtgtcgcagtcttcaagcgccgtctgaaagtggcccaggatgagctcaacgaaagcttcgcagcctgttgggatgatgcggcgcaacgtgaacaggccgagcgcctgatgcggcgcatgcagttcctcgacaagctcacctacgaagtgcgccagctagaagagcgcctcgacgattaacccagtgtgctgcccgtgatgcacgcctgatagacagataagacctgattaccatggccctactgcaaatcgccgaacccggccaaagccctcaaccgcaccagcgtcgcctggcggtcgggattgacctgggcaccaccaattccctggttgctgccttgcgcagcggcctgtccgagccgttgcccgacgcggatggccaggtgatcctgccgtccgccgtgcgctaccacgccgatcgcaccgaagtcggtgagtcggccaagctggctgcgtctaccgaccccttgaacaccgtgctgtcggtcaagcgcttgatgggccgtggtctgtccgacgtcaagcaattgggcgaccagttgccgtaccgctttgttggcggtgaatcccatatgccgttcattgacaccgtacagggtccgaaaagcccggtagaggtgtcggcagacatcctcaaggtgctgcgccagcgtgcagaaaccactttgggtggcgagctggtgggcgcggtgatcacggttccagcgtatttcgatgacgctcagcgccaagccaccaaagatgcggccaagctcgctggcctgaacgtgctgcgcctgctcaacgagccgactgcggcggccgtggcctatggcctggatcagcatgcagaaggcttggtcgccatttacgacttgggcggcggcacctttgatatttcgatcctgcgcctgactggcggcgttttcgaagtgctggccacgggtggcgacactgcgctcggtggcgatgacttcgaccacgccattgcgggctggatcatcaccggcgccggcttgtctgccgacctggacccgggtgagcagcgcagcctcctgcaagccgcctgtgccgctaaagaagcgctgactgatgctgcttctgtccaagtttcctacggctcctggtcggcccaactgacccgggaagcctttgattcgttgattgagcccatggttgcccgcagcctcaaagcctgccgccgcgccgtgcgtgactcgggtatcgagctggaagacgtggccgctgtggtcatggttggcggttcgacccgcgtgccacgtgttcgcgaagctgttgccgaagccttcggccgtcagcccctgaccgaaatcgatccggatcaagtggttgccattggcgctgcgatccaggccgataccttggctggcaacaaacgcgagggtggcgaactgctgttactcgacgtgattccgttgtcccttggactggaaaccatgggaggcctgatggagaaggtgattccacgcaacaccaccatccccgtcgcccgtgcccaggatttcaccacgtataaagttggccagacggccatgatgattcacgtgctgcaaggcgagcgcgagctgatcagtgactgccgttccctggcgcgcttcgaattgcgcggtatcccggcgatggtcgcgggtgcggcgaagattcgcgtgaccttccaggtcgacgccgatggcctgttgaatgtggcggcgcgcgagctgggctcaggcgttgaagccagcattcaggtcaagccgtcctacggcctgaccgacggcgaaatcgccaagatgctcaaggattccttccagtacgccggtgatgacaaggtcgcccgtgtgttgcgtgaacagcaggtggacgcccagcgtctgcttgaagcggtgcagggcgcccttgatgctgatggcgaacgcctgctggacgccgaagagcgcatggtcatcgacctgcagatgcaggaattggccgaattgatgaaaggcgccgatggttatgccatcgagcaacagaccaagcgtctgtcgcaagtgaccgatgcttttgccgcccgtcggatggaccagtcggtaaaagccgccctggcgggacgcaacctgaatgaaatcgaggaataattaatgccgcaggtcatttttctgccacacgccgagcattgcccggacggtatggtcgtggaggctgagaccggcaagtccatcctcgaagttgcccatgacaaccacatcgagatcgaaagtgcctgcggtggcgtctgcgcctgcaccacttgccattgcatcattcgcgagggtttcaattcccttgaagaagccgatgagctggaagaggactttctggatcgcgcatggggcctggaggcgcaatcgcgcctaagctgtcaggcaaaggtcgggactgaagacattaccgtcgaaattccgaaatattccctcaaccatgccgccgaagcgccgcattgattcaaggaaatgtcatgagcctgaaatgggttgatgtacaagaaatcgctatacaacttgctgaagcgcatcctgaggtcaatcctcttaccgtgaacttcgtcaagttgcgcgacctcgtaatggcgctgccggaattcgacgacatcccggaccggggtggcgaaaaggttctggaggcgattcagggtctgtggatcgaagaagcagacgactgagccgcatttttacgcagttaggcaatacctgataacccgcgtataattcgcgggtttaatttttcgtaaattaccgtttctggagttacaccatggctgttcaacgtactttctccatcatcaagcctgacgctgttgcaaaaaacgtcatcggcgagatcaccactcgtttcgaaaaagccggcctgaaggttgtagcttcgaaactcaagcaactgtccaaagccgaagctgaaggcttctacgctgagcacagcgctcgtggcttcttcggcgacctggtggccttcatgatctccggtcctgttgttgttcaggttctggaaggcgaaaacgctatcgctctgaaccgtgagctgatgggcgctaccaaccctaaagaagccgctgccggcaccatccgtgctgacttcgctgagtccatcgacgccaacgctgttcacggttcggactccgaagccgctgctgcccgcgaaatttcgtactttttcgctgctactgaagtaaccgctcgctaagcattggcttaaagagtgagggtgaatccatgactacatcgactgttaaaaccaacctgctgggtctgacccagccggaaatggagaaattcttcgactcaatcggggagaagcgtttccgtgccggtcaggtaatgaagtggattcaccactttggcgtcgacgatttcgacgccatgacgaacgtcagcaaggccctgcgcgacaagctcaaggccattgccgaggttcgtggtcccgaagttgtcagcgaggacatctccaccgacggcactcgtaagtgggtggtgcgtgtggcgtccggcagctgcgtcgagaccgtttacattccccagggcaaacgtggcacgttgtgcgtttcgtcccaggctggctgtgccctggactgcagtttctgctccaccggcaagcaaggcttcaacagcaacctcaccgccgccgaagtgatcggccaggtgtggattgccaacaaatcctttggcagcgtcccggcaaccgtcgaccgtgccatcaccaacgtggtgatgatgggcatgggtgagccgctgttgaacttcgacaacgtcatctcggccatgcacctgatgatggatgacctgggctacggcatttccaagcgccgcgtaaccctgtcgacctccggcgtggtaccgatgatcgatgagctggccaagcacatcgacgtctccctggcgttgtccctgcacgcaccgaatgacgcattgcgtaaccaattggtgccaatcaacaagaagtatccgcttaagatgctgctcgaatcttgccagcgttatatggcgaccttgggtgaaaagcgtgtgctgaccattgagtacaccatgctcaaggacatcaacgacaaggtcgagcacgccgtcgagatgatcgagttgctcaagaacaccccgtgcaagatcaacctgattccgtttaacccgtttccccattctggctacgagcggccgagcaacaacgccatccgccgtttccaggatcaactgcaccaggctggctacaacgtcaccgtccgcaccacccgtggtgaagacatcgacgccgcctgtggccaattggtagggcaggtgatggaccgcacccgccgcagcgagcgttatatcgccggacgcgaacagaacgccgccgacgatttaccgctgattgctgtgaatcgactctgagagaggatctctatgcccttgcgccttgcgctgcttttgcttgttaccggtctcgtggccggttgtgtttcatcgggccatgacagccctttgcagaccggtaaaggccgtgacgaggcgcgagttgcctatgtgcaactgggcttgggttatctgcgccaaggcatgagcgagcaggccaaggtgccgctgagaaaagcgctcgagctggacggcgacgatgccgacgccaacgccgccctggcgttggtattccaggcccaggccgagcctcaattggccgatcactatttcctgaaagctctggcttcacggcccgccgacccgcgactattgaacaattacggcagctttctgttctcccaacagcgttatgaacaggcctccggttatttccggcaagcctctgccgatgctctttacccggagcggtcgcgggtgttcgagaaccttggggtgacctcaatgcgcctcggccagcgcgacagcgcccgccagcagttggaaaaagccctgcatttgaacggtcgtcagcctctcgcgttgctcgaaatggctgagatgtcttacgaagacaggcattatgtgccggcacgtgactattacgagcgttttagcctgctcagcgggcaaaatgcacgtagtctattgctcggtgtgcggctggcgacggttcatgaagaacgcgacacggctgcacgttttggccagcaactcgaacgactctatcccggtacgccggaatatcagcaatacctgtcggagcaatgatgaaagcggcgcacccggaagttgtagcagctaatcgcgtaaacccaggcgagaccttgcgtcaggcccgcgaaagcaatggttggtcgctggcagaagtggccctcaagctcaatttgaccaccacgtccctcggcaatctggaagccggcgcgttcgacaagctgcctgggcatacctttgcccgcggctatatccgcgcttacgccaagttgctgggtattgaccaggccgtgctggtccaggagttcgaccagttcaccggtactgactcccaaggcagtaacgtgcatggcctgggtcgtatcgaagaacctgtacgggtttcccacacgattttgcgcattgtcagcctgttgctgctgatcgccgtgattggcggtggcttcgtctggtggcaagaccagaccacccagcgcgccaaagacctgaccagcaacgccatggaacacgtcgaagtcgaaagcgctgacggcaccactcagattcatccgctggacgagccggaagaccaggccgttgccgaaggccaggccgcgccgcaagcactagccgctgccgagcaacccgctaccgaagcgaacactgcgcctgctgcagcccccgctccagcggcgcccgcggctccgacagcgccagtggcacacacgccggtcgcgcctgtgcaggccccggcgccaacagccccggcagccccggctgtttcggcgccgaccacgcctgcgttgatcgccggtgacgggcatatccagattaccttcgtcgctgactgctggacgcaagtcaccgacggcaacggcaaagtgctgttcagcggtctgaagcgcaagggagatacgcttgaccagggcggcaagcctcctttgacgctgcgtctgggctttgcccgtggcgcgcaagtggcctacaacggccagcctgtggacgtggcgccgttcaccagtggcgagactgctcgcctgaagttgggacaatagtcatgcacggcgaatctccaatcaaacgtcgcgtatcgcgcaaaatctgggtcggttcggtgccggtgggtggcgatgcccccatcgcagtccagagcatgaccaacagcgacaccaatgatgtggccgccaccgtggcccagatcaaccgtctggaagctgccggcgtcgacatcgtgcgcgtttcggtgccggacatggatgctgccgaagcgtttggccgtatcaagcaactggtcaaggtgccgctggtcgccgacattcacttcgactacaagatcgccttgcgcgtagccgaactgggtgtggattgcctgcgcatcaacccgggcaatatcggtcgcgaagaccgggtgcgcgctgtggttgacgccgcccgtgaccgtggcatccccatccgcatcggcgtgaacgccggttccctggaaaaagacctgcaaaagaaatacggcgaaccgaccccggccgcgctggttgaatcggcgctgcgccacgttgagcaccttgaacgcctgaatttccaggacttcaaggtcagcgtaaaggcctcggacgtgttcatggcggtagaagcctaccgcctgctggccaaggaaatcgtgcagccgctgcacctgggtatcactgaagcgggcggtttgcgctcaggcacagtgaaatctgcggtgggtctcggtatgctgctcgccgaagggattggcgataccatccgcatctccctggcggcagaccctgtagaggaagtgaaggtcggttacgacattctcaaatccctgcgtttgcgttcccgtggcatcaatttcattgcctgcccgagctgctcgcggcagaacttcgacgtggtgaaaaccatgaacgatctggaattgcgccttgaagacctgctggtgccgctggatgttgcagtgatcggttgcgtggtcaacggcccgggtgaagccaaagaggcgcacgtaggcctgaccggcggtacaccgaacctgatttacatcgacggcaaaccgtcgcagaagttgacgaatgacaatctggtggatgagctcgaaagactgatccgcgagaaagcggccgaaaaggtcgcggctgacgcagcgctgatcgcgcgcggctgattgaacgaatttaaggatcagatgtgagcaagtctctgcaagccattcgtggcatgaacgacatcctgccggagcagacgccactgtggcgttacttcgagaacacggtcgcgcgcctgctggataactacggttacaagcagatccgcatgccgatcgtcgagttcaccgagctgttcaagcgctccatcggtgaagtcaccgacatcgtcgaaaaagagatgtacacctttgaagaccgcaacggcgactccctgaccctgcgtccggaaggtactgccgcgtgcgtgcgtgctgtgcttgagcatggcctcaccggtgctggccagccgcagaagctgtggtacatcggcccgatgtttcgccacgagcgtccacagaaaggccgttatcgccagtttcaccagatcggcctggaagtgttcaacatcgatggcccggacatcgacgccgagctgatcgtgctgacctggcgcctgtggggcctgctgggcatccgtgacgcggtcaagcttgaactcaacagcctgggtaccagcgagtcccgcggccgctacaaggttgcgctggtcgagtacctgtccgctcatttggacaagctggacgaagacagccagcgccgcctgaaaaccaacccgttgcgcgtgctggataccaagaacgccgacactcaggccgtactggtcaacgcgccaaaaatggccgactacctggacgatgaatcccgcgtgcactttgagggcctcaaggctcgcctggatgcagccggtattccgttcgtgatcaatacgaagctggtgcggggcctcgattactacagcaagaccgtgttcgagtgggttaccgacaaacttggcgcgcagggcactgtctgcgcgggtggtcgttacgacggtctggtcgaacagatgggcggcaagccgaccacgggcgtgggttttgccatgggcatcgagcggctgatcctgttgctcgaaaccctggagcaagttccagaagaaatttcccgtcaggtggacgtgtacctgtgcgcttttggcgaggccgccgaactggctgccctggccctgagcgaaaaggtgcgtgaccaactgccgaacctgcgcctgcaagtcaatgccggcgccggcagcttcaagagccagttcaagaaggccgacaagagcggtgcactgtacgcactgatccttggcgatgacgaactggcccagcaagtgataggtttcaaacccctgcgtggccagggcgagcaacagaacattgcctttgatgcgctcgctgcgcacttggccacctgcgtcgtgcagggttgaagctgtcgaacagccgaatttagcgattaaggagtattggggtgtcgagtactgatgatgatcaactggccgagttcaaggactggtggcagcgtaacggcaagcccttggttaccggcggtctgctggctttagtggtggtgttcggctggcaggcctggcacaagtatcaggccaaccagtcccagggcgcctcgatcctctatcagcaattgctggaaaccacgctgacgccggatggcaagccagaccctgcccaagtggcagacctggccagcaagctgaaaaatgaattcggcggtagcacttacgcccagtacggcagcctgttcgtcgcgaaagttgcggtcgacaccggcaagctggatgacgccgccaccgagctgaaggccatagccgacaaaccgaccaaccctaccctgggtgaaatcgcacgtcagcgcctggcgcaggtattggcggcacagaacaaggctgacgaagcactcaaactgctcgacggcgatgctgacaaggcatttgtggccactcgtgaagagctcaagggcgacctgttggtccaattgggtcgtaccgatgaagcccatgctgcgtaccaaaaggccaaggcggcgctgtctgatgaagcggcggtcggtggcttacaaatcaagctcgacgacttggccaaaggggatgcgtgacgtgatccgttggaaacatgcagcattgctggctctggccgttctggccgcgggttgcagcagcaacagtaaaaaagaactgcctccggccgagctgaccagcttcaaggaagaagtggtcctgcaaaagcaatggagccgctccgtcggtgacggccagggcgacctctacaacctgttgcagccggcaatcgacggcgacaacatcgtggccactgactccactggcgtgatcatcgccatggaccgcatgaacggcgacgtgaagtggaagaaagacctcgaactgccggtttccggtggtgtgggggtcggctatggcctggtgctggtcggcacgcttaaaggcgacgtggtggctctggattcggctaccggtgaagagaaatggcgcgctcgcgtgaccagtgaagtactcgcatcgccagccaccaacggcgatgttgtcgtggtgcagacccaggacgaccgcgtgatcggcctggacgctgctaccggcaaccagcgctggttgtacgacagcacgccggcggtactgacgttgcgcggcaccagtggtccgattgtgaccaataatctggccgtggcaggcctgtcgaccggtaaagtggtcgccctggacacccagaacggggtgccggcctgggaaacccgtgtggccatcccgcaaggtcgttccgaactggaccgcgtagtggacatcgacggcggcttgctgctgtcgggtgaaaccatctatgtggccacctaccagggccgcgttgcggcgctggacctgcaaagcggccgcatcaactggcagcgtgatgcttccagttatgccggtgtcgcccaagggtttggcagcgtctacgtaagccttgcttccggcaccgttgaaagtgtcgacgagcgttccaccactgcactgtggagcaacgactcgctggcccgtcgtcaactgtcggccccggaagtgttctccagctacgtagcggtaggtgacttcgaaggttacctgcacctgctgagccaggtggacggtcgcttcgtaggtcgtgagcgtatcgacagcgacggcctgcgcgctcgtccgctggtcgtgggtaacatgctttatgtgtttggcaacagcggcaagctggaagccctgaccatcaagtaagaactatgcttggggtaacacccaggcggccccgcttcggcggggcatgcggcatttgattatgctgccccgagcaccagccgctgccttgcagcggcttttgtattttctgaaataacgaagtggagagccgcatggttcccgtaatcgccctggtgggccgacctaacgtcggcaagtccaccttgttcaaccgcctgaccaggactcgcgacgccattgtcggcgacttgtccggtctgacccgtgatcgccaatacggtgaggcaaagtggcaagggcgctcctacattattgtcgacaccggtggtatctccggcgacgaacatggcatggacgaaaagatggccgagcagtcactgctggccattgaagaagctgatgtcgtgctgttcctggtggacgcccgcgcgggctacaccgccgccgaccagatgattggcgagcacttgcgcaagcgtaacaagcgctcgtatttgatcgccaacaagatcgacaacatcgatcctgagcaggcccgtgccgagttcagcccgatgggcctgggtgatgcaatcccgatcgccggtgcccacggtcgcggtatcacccagatgctggaaatcgccctgcgcgacttcccgaaggatgatgtcgaggaagaagagggtgaggaagagatcgttgccgaaggtgaggaagccaagcgcattcctggcccgagcgaaaaagacggtatcaagatcgccatcatcggccgcccgaacgtcggcaagtcgaccctggtcaaccgcatgctcggtgaagaccgtgtaatcgtgtatgaccaacctggcaccacccgcgacagcatctacatcccgttcgaacgtaacgaggaaaagtacacgctgatcgacaccgccggcgtgcgcaagcgcggcaagatccacgaggaagttgaaaagttctcggtggtcaaaaccctgcaagcgatcaaagacgccaacgtggtgatctttgtgatggacgcccgcgaaggcgtggtggaccacgacctcaacctgctgggctttgccctggaggccggtcgggcactggtgatcgcgatcaacaagtgggacggcatgacgccgagcgagcgcgatttcgtcaagatcgagttgcagcgtcgtctgttcttcgttgagttcgccgatatccacttcatctcggccctgcacggcaccggtgtgggtaacctctacgcgtccgtacagaactcgttcaagtccgcggtcacccgctggccgaccaaccgcctgacccagattctggaagatgcggtgggcgagcatgcgccgccgatggtcaacaaccgccggatcaaactgcgttacgcccacttgggtggtgccaacccgccgattatcgtgattcacggtaaccagatcgagaaggtgcccaaatcctacgtgcgttacctggaaaacacctaccgccgcgtcttgaagctggtcggtacgccgatccgtatcgagttcaagggtggtgataacccgtacgaaggcaacaagaacacactgactgaccgtcaggtgaacaagaagcgtcgtttgatgactcaccacaagaaggccgacaagaagcgtcgtgacaagaaataacgactgcttcacgttgtaagctacaagctgcaagagagggccctttcagggcccttttttgtgtgcgatggtttgtcgcttgacctgcttgcggcttgcagcttaaaacttggggctcacctgcaggggccaccgatgatcaccagcaagctgccgaatgtcggcacgaccattttcaccaccatgtcgcaactcgccgttgaaaccggcgcgctcaacctgtctcagggctttccggatttcaatggcccacagggcctgctcgatgcggtgggcaagcatatcgccctcggtcataaccagtacgcgccaatgaccggcctgccagtgttgcgtcagcaggtggccgccaagatcgcccgcagttatggcgccgcggtcaatgtcgacagcgaggtgaccattacaccaggcgccaccgaggcgattttttgcgcaattcaggcggtgattcgcaatggcgatgaggtcattgtgtttgacccctgctatgacagctacgagccttcggtcgagctggccggtggtcgttgcgtgcatgtacaactgagcttgagcggttttgccctcgacttcgagaagatcaaggcggcgctgtcaccgcgcacgcgcatgatcatgctcaactccccacacaacccgaccggtgcgctgatcagccgcgccgagctggatcagttggccgaaatgatccgcgaccgagacatctatctggtcagtgatgaggtttacgagcacctggtgttcgacggcatgccccatgtcagcgtgctggcgcatgaggagctctaccagcgcgcgttcgtggtgagttccttcggcaaaacctaccacgtcaccggctggaaaaccggctacgtcgtcgcgccaccggccctgaccgcagagctgcgcaaggtgcaccaatacgtgaacttctgcggcgtgacgcctttgcagtacgcgctggctgacttcatggcccaacaccccgagcacgtcgaggaactgccggcgttctaccaggccaagcgtgacctgttctgcgacctgctggcgccgtcgcgtttcagctttacccgggtggcgggcacctacttccaactggtggattactcacagatacgcccggacctggacgacgtggccatgtccctgtggatgactcgcgaacacggtgtcgcaaccattccggtgtcggtgttctatcagcacccaccccagggccagcgtctggtgcgcctgtgctttgccaaacgcgaggagacgctgcagcaggctgcggagaaactctgcgtgatctgactgccgacagttttcggtttgtttgatagaccgccatcgcgggcaagcccgctcccacatttggaatgcattccccggtgggagcgggcttgcccgcgatgaggccctcacatacaacaccaacaaaaaggcccctggattttcatccaggggccttttgtatttctgcggcaggcgtttacgccgctttcgcttcctgctggctcaacgagcggttcagcgcactgaacagcgccttgaagctggctgtggtgatgttttcatcaatgcccacgccatgcaccggacgttcgccattcacgcgcaattcaatgtaggccgccgccttggcgttggtgcccgcaccgatggcgtgttcgttgtaatccatgatttccacaccaatcggcagacccgccaccagcgcttccagcgcgccgttgcctttgcctttccagtgcaggttggtttcgccctggcccttgcccgacacttctacctcgacaaagctgttgccgttctcttcctgcaggcgatggctgaccagcgcatacggggtgttggcttgcaggtattcgcgctgcagcaaggcgtagatctgtggcgcagtcatctccaggcccacgcggtcggtttcggcctgtaccacttggctgaattcgatctgcatgcgacgcggcaggctgatgtcgtattcctgctccagcaggtaggcgatgccgcccttgcccgactggctgttcacacgaatcaccgcctcgtagctgcggccaatgtcggccgggtcgatcggcaggtacggcacttcccacagggcatcgtctttctgctgggcgaagcccttgcggatcgcgtcctggtgggagccggagaaggcagtgtgcaccaggtcgccgacgtacgggtgacgtgggtgcacctgaatctggttgcactcttcgacgactttgcgcacgccgtcgatgtcggagaagtccagctgcgggtcgaggccctgggtgtacatgttcagggccacggtcaccaggtcaacgttaccggtgcgctcgccgttgccgaacaggcaaccttcaacgcggtcggcgccggccatcaggcccagttcggtggcggccacgccggtgccacggtcgttgtgggtgtgcaggctgatgatcacgctgtcacggcggttgatatggcggccgaaccactcgatctggtcggcatagatgttcggcgtggcgcactcaacggtggcgggcaggttgaggatcatcttgtgcgaaggcgacgggttccacacctcgatcaccgcgtcacagacttccttggcgaactccagctcggtcgcgctgaaggtttccggggagtattcgaaggtccactgggtttccggctgctgggcggcatatttgacgaacagcttggccgcgttcacggcgatggccttgatgccctctttgtcctggttgaacacgatgcggcggaacgacggcgaggtggcgttgtacaaatgcacgatggcctttttggctccgcgcagggattcgaacgtacgcgcgatcaagtcttcacggccctgggtcagcacctggatggtggtgtcctcggggatgtggttgtcttcgatcagggtgcgcacgaagtcgaagtcggtttgcgaggcggcggggaacgaggcttcgatttccttcacgcccaccgagacgagggtcttccagaagcgcagctttttcgcggcgtccatcggctcgatcagcgactggttgccatcacgcagatcagagctgcaccagatcggcgcttcggtaatggtcttcgacggccaggtgcggtccgggatatcgatggtcgggaacgcgcggtacttcgaagacgggtctttgagcatgctcatcggaaaatcctttgttgtagggccgagaagaggcggcctgccagaaagcgtttattagggataaagcgggagacgaggcagatcgattcagcctggcagtcgtgcgctgacgaggcacaggctgcggtgctggcggagctgaatgagggtgtgagaggttttcataagctcaaccctaaccgtcggggtgaaagatggcaagcagtcgagaaaaattgagataagttttgctgtgtgcgcaaggggcgagattttattgctttatctaaggatttatcgtgttttgtttgcgtggcatttgtcagctgcgcaatagcgtcgactggcctggcgtcatcgcaggcaagccagctcccacagtaaagggtgttccaatgtgggagccgggcttgcccgcgatggcgccagtagcctcacccctcatatcagggctggaaagcaccaatgaggatcgccgggtcgacccgcgcgtcattgaggctgatgttccagtgcatgtgcggtccggtcgcgcggcccgtcgagccgaccttgcccaccactgcgccgcgcggcagctgatcgccgacttttacgtcgatcttcgacatatggcagaacatgctgataaagccctggccatgatcgacaaacacggtattgccattaaagaagtagttgccggtcaggatcaccttgcctgctgccggggtcttgatcggcgtgccggcgccgactgcgaagtccaggcctgaatgcgggttgcgctcctcgccattaaagaaacgacgtacgccaaacttgctcgacagtggcccgttgaccggcttgtccagcagcaggttgctcggcgtgttcgggctgaaactgcggtaggcctttagctgcacggccagttcgccttcgatgcgtttgagctgcgcggggtccgggttcacctggcttttgttcttcagggtgatgtgctgctcggggtatttcttgaagcccaccacgaacggcaagttctgcccgccgctgacgacgcgttcagtgccgggtttgaccgtcagggggatgccgacgatcgccagccagttgttctgttccttcaccaccagtaccggccggttcaagtaagtggccttgggcgctgtcgccgaagtgccgaggtcgaccaccgccacgccgccgggcaccggcttgttcagcaggcgtgtgatgtaactgtcggcgtgggcgttgaaggtcaggcaaacgagcatcaacaggctgagaaaacgtggcatcgatcagtccagtaacgaaagggtgacgggtgtcaggtggttgtcttccacccgtacctgcaattggccttcaccgaggcgcgcggtcaggcgctggccggtgtgggtttgcgcggcagtgcgaatggcctggccgcgctcgtccagcaggatgctgtaaccacgaccgagggtcgccagtgggctgaccacgtgcagcgtctgcacctggctttgcagttgcagccgccgtgccttgaggccttcgcgcatggcacggggcaggcgttcggcgaggctgtccaggcgttggcgcagcagggccagctggcgccccgggtgttggccggcgaggcgtgtttccaggcgaatcaggcgttcgcggcgggtattcaggctgcgctcgaaagcacggcgcaggcgcatgtccaggtcatccaggcgctgggcttgctggcgcaggcgttcgccggggtgacgcaggcggcgggccatgccttcaaggcgcagacggtcgtgggcgaggcggttgcgcatcagcatgaccaggcggcgatgcaggttttcaacctggcgcaccaggtggctggcgtctggcgcgagcaattcagcggcagcggagggcgtcggggcacgcacgtcggccacgaagtcgctgatggacacatcggtctcatggccgacagcgctgacaatcggcgtgacgcaagcgtcaatggcgcgggctacggcttcttcgttgaagcaccagaggtcttccagggaaccgccgccacgggccaggatcagtgcatcaaagccacgcgcatccgccagtttcagcgcgcgcacaatctgggaaatggcttcacggccttgcacggcggtcggaatcagtgtgagttctacgttaggcgcccggcgccggaacacgctgataatgtcgcgaatcaccgcgccggtcggcgagctgatgatgccaatgcgccgagggtgcgccggcagcggcactttgcgctcggcactgaacagaccttcggcgctgagcttttccttcagcgcatcaaaggccaggcgcagtgcgccatcaccggcgggctctacggtgtcgaggatcagttggtagtcaccacggccctcaaacagcgagaccttgccgcgcaccttcaccgccaaaccgtctttcaacgcctggcgaacccgcgcggcattgttgcgaaacaacgcgcaacgcacctgggcgccgctgtccttaagggtgaaatacacatggccggaagccgggcgggcgaggttggagatctcgccttcgacccagatattggtgaacacatcttccagcaacacccgcgcacggccgttgagttggctgacagtcaggacttcgcggtccaggcccaggcgggcaaaaggatctttaatcatgggcggaagtttataggcattcgtgcagggtttggcagaattgctcgaccaacgcattcggcgcctgcgcgcaggccaaggccacggtgctgaggcagtccgggtcggccaggggcaagaagtgcacgttggcaggggcaatatccctcatggattttggtaacaaggcaataccgaagccggcctggatcaactgcaactgggtggtcttgcgcgacatcacccgcgccgccttggggaaaaagcctgcgcgcatgcacagctcggctgacagataactcaggccgccgcgctggggatgagggattgaaataaacgcttcgtccttaagctgctccagttcgatgggggtattgctgcgcgccagtgcatggttgggcggcacggccagcagcaatggttcactgtataaaggcacgatccgcacaccttcacgctggcgcaacacgggcaggcgcagcacaccgacttccagacggccgtcggcgatttcctccagttgcgcctcggaagacagtttggcgatgtccaccgaggcgcccgggcagcgctccaaccaggcgctgatgccttgcaataacgcgccgctcatcggcacggtgctcgaatggctcaggcgcagggtgcccagcctgccattgccgacttgtgtcgccatctcgctggccttgagcaactcattcagaaggttacgtgcccgtgggtagaaggcttcgcctgctgccgttagccggggctggcgcgcggtgcgttcaaacaacggggtttgcagctggttttccagttccttgatctgccggctcaacgccgactgcgcgacaaacaggcgctcggcggcggcgctgaagctgccgctgtcggcgatttcgacgaagtaacgcagttggcgggtagagatcacgcgtcatgccttttcgagatgggtggagagctttgaagatattagtcgcaacactcgtcgatggctaaagtgaggggcatctctttcaaggaataagtcatgagcccggttgagctgatgagccagtggtcgtttggcggagtgcagtggctggtgatcggcgcagcggtcgtcgtggcctatgtcgtgtttggtatcgccgggtttggcacggcgctggtggcggggccgatccttattgtgtttatgccgctggcgaagatcatcccgctgctggtgttgctggattttgtggcggcgttcggcaacctgctgcaatcgcgcaaggaggtgaataaaccggaattgctgcggttgctgccgtgcatggccattggttgcacgctgggcgtggtgtttttgctcaatctgcattcggatttgttgttgctgttgatggggctgtttatcagcgcctatgcggtttacagcctgttggtgaaggcgcggccggcacaactgagggcgggctggtcgattcccatgggaacagtgggcgggctgttcggtgcgctgttcggcagtggcggtttcctctacgcgatctatctgaatagccgtctgcccaaagacgcggcgcgcgccacccagagtgcgttgatcagttgcagcacggtggtgcgcctgagtttgtttttgatggccggggtgtatgcggatttgccgttgttgatgttggcgctgtgcctgttgccggcgatggccgtggggctttggtgtgggcgcaggctgacgatgcgcatgtcccgcgaggcgtttgtgcggtgggtgacctggctggtgctggcgagcggcattgcattgatcgggcggtatttgagtacttgacctgtgtggggcagggattaagctgccagcctttagggcgccatcgcgggcaagcccgctcccacattcgaccgcatttctcctatgggaatacggtcacctgtgggagcgggcttgcccgcgaaggcgtcagacgacacaccgcaggactctcaggcctcatgaactcccaaagcatccttgtcccgaaaatctccaccttgcccgtccacgagccccgcgccagggcgatcgtgcgctggctggtgcgcaagaacatcatcaaggaagagctgaccacctgtgggcgcaccggcaaccgcatgggctacgccctggccgatggcgcccgcgccgtggtgttgcaccccgaggcgctgccgttcaacgagccggtcaacggcctggagatcatctacaagcgctgcatctatacgccggccaaaggctttctcgaagaagccggttgcccggagtgccttaaagaagtcggcgaggcgctgttcgaaagcctggaagactggatgcccggccacaccgataacttcacctgcccgttgtgtgggcatgaggacgacatcaacgggtttctgttcctgcaggaatgcggtttttccaacctgggattcatcttcaacaactgggcggaagcggggttcaagcagagctttatcgacgaatttgccgattggctggaccagaagatgagctgggtcaaagtcgagctttaacccatctatctgtattcccaaatatgtcagagttttacattgaacccgagggggtgtctgactataatggcgcgcttccattttcccgctcgggagcccccgcgatgctgcgtatcagccaagaagctctgacattcgacgacattctcctagtgcccggttattccgaggtgcttcctaacgaagtcagtctcaagacccgcctaacccgtggcatcgagctgaatattccccttgtttccgctgccatggacaccgtcactgaagcccgactggcaatcgccatggctcaggaaggcggcatcggcatcattcacaagaacatgaccatcgagcagcaagctgccgaagtgcgcaaggtcaagcgttacgaagccggtgtggtgaaagatccaatcaccatcgaggccgacgccaccgtgcgtgacctgttcgacctgacccgcttgcacaacatctccggtgttcctgtgctgcacgatggcgacctggtcggcatcgtcacttcccgtgacgtgcgtttcgaaaaccgtcttgaagtgaccgtccgtgaagtgatgacgcccaaagagcgcctggtcactgtcaaggagggcgccgacaagaacgatgtgcgcgagctgctgcacaagcaccgcatcgagcgcgtgctgatcgtcgacgacaaatttgcccttaaaggcatgatgaccgtcaacgacatcgaaaaagccaaggcttacccgctggccagcaaggatgaccaaggtcgtctgcgcgttggcgcggcggtcggcaccggtaaggacaccggtgaccgtgtttcggcactggtcgctgccggcgttgacgtggtggtggtcgacaccgcccacggtcactccaaaggcgtgatcgaccgcgtgcgttgggtcaaacagaatttccctgaagtgcaagtgatcggcggcaacatcgccaccggcgctgccgccaaggccctggccgaagcgggcgcggatgcggtcaaggtcggtatcggccctggctcgatctgcaccacccgtatcgtcgccggtgtcggcgtgccgcaaatcagcgccatcgccaacgttgctgctgcccttgaaggcacgggcgtgccgttgatcgccgacggcggcatccgtttctccggtgacctgtccaaggccatcgtagccggtgcctcctgcgtgatgatgggttcgatgttcgccggtaccgaagaagcaccgggcgagatcgaactgttccagggccgctcctacaaggcttaccgcggcatgggttcgctgggcgccatgtcccaggcgcagggctcttccgaccgttacttccaggactcctcggcaggcgccgagaagctcgtcccggaaggcatcgaaggccgtgtgccgtacaaaggcaccctgagcgcgatcattcaccaactgatgggcggcctgcgttcctcgatgggctacaccggcagcgccgacatcgaagaaatgcgcaccaagcctgagttcgtgcggatcaccggcgccggcatggctgagtcccatgtccacgacgtgcagatcaccaaggaagcgccaaactaccgcgtaggttgaggcttccagcaaaacgttaagtaaccggggctgttttcagccccgagttgtttctgattttcttcaccgaattgcatagacgagactgaccccatggccctcgacattcacgcccaccgcatcctgatcctcgacttcggttcccagtacacccagctgatcgcccgccgcgtgcgcgaaatcggcgtgtactgcgaactgcatccgttcgacatggatgacgaagcgatccgcgaattcgcccccaaaggcgtcatcctcgccggtggccccgagtccgtgcacgaagccaacagcccgcgctgcccgcaagccgtatttgacctgggcgtgccggtcttcggtatctgctacggcatgcaaaccatggccgagcaactgggcggcaaggttgaaggttccgagctgcgtgaattcggttatgcccgtgtcgacgtggtcggcaagagccgcctgctggacggcatcgaagaccacgtcgacgccgacggcctgttcggcctcgacgtgtggatgagccacggtgacaaagtcaccaaaatgccggaagacttccacatcctggccagcaccccgagctgcccgatcgccggcatgttcagcgacgagcggcgttactacggcgtgcagttccacccggaagtgacccacaccaagcaaggcggccgcatcctgtcgcgcttcatcctcgatatctgcgagtgtgaagccctgtggaccccgtcgaaaatcgctgaagacgctatcgcccaagtccgtgcccaagtcggcaccgacaacgtgctgctcggcctgtccggcggcgttgactcctccgtggtagctgccctgctgcacaaagccatcggcgaccaactgacctgcgtgttcgtcgacaacggcctgctgcgcctgcacgaaggcgagcaagtgatggccatgttcgccgagaacatgggcgtcaaggtgatccgcgccaacgccgaggaccagttcctcaacaacctggccggcgagtccgacccggagaagaagcgcaagatcatcggccgcaccttcatcgacgtcttcgatgcccagtccaacaaactggacaacatcaagtacctcgcccagggcaccatctacccggacgtgatcgagtcggctggcgccaagagcggcaaggcccacgtgatcaagtcccaccacaacgtgggtggcctgcctgaggaaatgaacctcaagctggtagaaccgctgcgcgaactgttcaaggacgaagtccgccgtctgggcctggaactcggcctgccatacgacatggtctaccgccacccattcccgggcccgggcctgggcgtgcgcatcctcggtgaagtgaaaaaggaatacgccgacctgctgcgtcgcgccgaccacatcttcatcgaagaactgcgcaaagccgactggtaccacaaagtcagccaggccttcgtagtgttccagccggtgaaatcggttggcgtggtcggcgatggccgtcgttacgcgtgggttgttgcactgcgcgcggtagaaaccatcgacttcatgaccgcgcgctgggcacacctgccgtacgaactgctggaaaccgtcagcggtcgtatcatcaatgagatcgaaggcatctcgcgcgtgacgtatgacgtgtcgagcaagccgccggcgacgattgagtgggagtgatcctgcggtagcaggtgagcgctgaataacaaaaccccggccatgtgccggggttttgtgtttttggtgcgcggtgagtcaaacaccaccaatcaaatgtgggagctggcttgcctgcgatggcatcacctcggtatgacttgataccccgccgcccgcatcgcaggcaagccagctcccacattttgatctctgtttgagactaccgccgcgcaatatccgaaaagtaaaacttatccagaatgttgacggaaagctgcgaagcaagcgttgcgtgttcaatgcacggcagaggcttgcataggcactagagaaactgcgatcgaatcaaatccgtgtcgaacggtgtaactccttgatcaggtgcaaacaccacctgtgcctgctgcggcgaagccactcgctctccgcgcgctcgaacatgtaggtcgaacagagtctccaaatcgggttttggtgtatgcaccaacgctcgcagcatcaacgataccccgctgaggttgttgtcgacgttgttccagcgcggtgaggaagtgagtcccagatcggcccaaatcatgcgtcgctcgtgcaagtccatcacaaacggcaaacagataactgtgtcggaggcgatatcgatacggtcgaacacggatttaggctcgaatacttcacccgacgccacgtccgtgcgggccatccagccagcgaagcattctggaagatcgcagtacggttgttgggtgaaggagttgatagacgtgacgacatagcgaatacccttctcaacgaggatatcaaggtcgaggtcaatgaactctgacgcccccttgggcgcgtccacgatatcgccactgtggtagccgccgtaacccttgaggttgtagtaagcaaccgcttccctgaacacgaagttgctgtcgaaaaatgctgcggacaagtcgatgtccgtgcgtgctcggccgttcttccaccaaaggaacaggcgaatgaagcgtgtatcagggattggcagccgactgccgcgcaccagcgtacgcagtgactttgctgacgcacgctgtgcaagcggcactctgtattcgcgcagttcgggatcgatgaagcagcgaccgagtggcggcaacgatgcaaaacgctttacgagagcgtcctcgcagattcgggcagcacgcgccagtacgtccggcgttagaggctcgcgccgatctttgatggcatagactttggccagcgcacctttaggcgtgaaggcacgcagagggagagggcgtggtgaatgtaactgcgccagcagttgtagcagaacaggtgatgacacctgtgccgcaaccgcctcgaacgcgtctaggactggctctggttctgctgctcgtcgcagggtcgcgtccaaccgtcgtgcgaactcaccaggacgactttctaatagatgcgtgagcgtgacgatctggcgctgggcaaacaaagtttctacacgtgacccaaacgaagcaggcgcatcattgcgccgcgcagccgtgatcgcggccagcgctcgtgggtatttatcggcgtagtcgcctggatgcaatacttcagacaggcgtttccagcgttcagcatgacgcatcacgtcttctacagcgttgggtatttggtcgagtaggcgcaaaagcagacggcgtatcgagcgcttcatcgctgtgaaacgtgtcgaagctgtcgccagtgacacgtctccaccactcagagcgaccgcgagtcgcagcacgtcagtcgctgtttcgacgtttttttcaaggaatgcgtccacccgcatatcgccggctacctgcaggataagtgcggcgccaacctgtgcacggatctccctgaatggtatcgcctcaggcagcaggcgaaacacatcgcttttgtacgctcggataaaccaggcgacatcggcggcttcctcttcggagagtgaagtgcgcgatgaaaccagtgactcaagcagtgcctcaaattcatcgatgcttcccggttcgataatgcgggatatgaagttgccttcaagcatcgcgggtcgggcattttcagtgggcggtaaacgaagaagcgtgaagtaatgaatgacggcgttaaggtacaactcgccctcagaggccgtgaggacctgttctggaaagtcaggataaaacggcttgtgctgaacatgagcgccagtttgccgttgaaggattccgatgatttcgctcagccaatgcttgagttctgtcgctgacaacatgccgattttttcaatcagggactctgatagtacgcatcggaatgtcgcgacttcccggaccgccgacgcgacctgagcgcgcgtggcaccgccaattcccgtcgggacgtgaactttgctacggcgacgcaggaacagctcctgattcatgcttgattttctccttgggtcgccgtcgtggccgagttgcagcgtcgttttacagccgatgtaaaaacgcctgcaagcagcaggcgtagtgtggagagcgaaacccctaggtcataggaggttagaaggaaggtgttccatagccacgaacgcatcctacggaaggttgtatttgtttgccaagtagcgacatatctcaacggtaacaagctgcttcaccaagctacgtttttgtacagtctgcttggcggaaggtttgtgtttctgatgtgcgaacgctcaaccaagaaccgcgcacgaagaaagcactattcaaaattaattgcattatataggatgcatttataaatttaatgaaattttgcattgaattggatgcactttgcatatggacgatctaggactactgatcaaaaacctgcgcaaaaccgccggcctttctcaaactcagctcgcgcaacggcatggcatgagtcgcgccaccatctcggggattgaaaacaacaccatcccggaagtggggattcgcaaggttgcggccatccttgaaggtttgggatacgaattgaccgctatccccaagcgtcggcgcatgacccttgatgagctgaaatcaggaaacatacatgacgaatcaaagtgatcgattgtatatcggcgtaggcggtgcggatgcaggaacactcggcagagctcaggagaacaggcgcgattcggttttctcgtataacgacacggttaccgaagagaacgctgtttccctgaccatgccggtgcgccttgagagctacaactgggagtatgggatacatcctctgttcgagatgaacatccccgaagggcatctcaaggacgagcttgtgcgacgcttcagcaagtcggtgcgtggctttgacgattttgctctgctaggcattgtggggccgcaccaactgggtcgtatcagcgttgcccatgaaggggggggcgagtcgttacccgaggtcaaactctccgagatgttggtctacgacggagccagagacctgtttgatgatttactgaaaacctatgcagcctactcaggggtatcgggtgttcagcccaaggtgctggtacgcgacgttgatgacatgccccccgacattgaacgtcttacccaccgaggtgcgacgcacttggtgaaggcgttcaatgagtctgactttccacaattggcggccaacgagtttttctgtatgcgggcagcattccattgcggccttgaagtgcctgaatttcagctcagcgcacacgggaagctcttggtggtaaagcggttcgacatcggtgcaaacgcctacctcggattcgaagacatgtgcgttctctcagggtggggaaccgcgaaaaagtacgatggaagctaccagggatgcgcgaagctgatcaggtcatttgtcacgcctagccgagtcaccagaacgctggaagatttcttcttgatggtggcactgtctgccggtatccagaacggtgatgcacacctgaaaaacttcggcctactgtatgagaattgcgccgaggaagcagacgtttggcttgccccggcttacgatctggtgaccaccacggtgtacagcagtaacgacatcatgggcttgctgcttggtggttcgaaggcttggccgaagcgcaagatgctggtccagttcgggcgcagttcctgcagtttgactgaggcacgttgcaacgaactgctagccagagtgcaagacggaatgacccgcgcgatggcagagctttcaaaataccgaagcactcaccctgagttcgaggcggtaggggagaagatgaccgctgcatggtcggcaggactggcgaagagtatctctgtgcaatgattctccccactcggcctcaccgccgcgcaatatccgaaaagtaaaacttatccaacgtatgccgcgactcggtgtactcgaactgccgcccgtcctgcaaaaacgtctgattactcaccacgatcacatggctttgcccgtcaaggtccaggtgcgcctggtcgtccttgctgcggggcagggcttcgatggtgcgttgggcgtaggcgatttgcagctgcaacgtctgttcgataaacgcgtagatcgactgttcggcaatcgagcggtccaggcccgggatcacgtcggcgacgaagtggttgatgtcgaggatcacgcgtttgccgccgatgtggcgtatgcgtttgatgcgggtgatcagcgtgccgggctcggcttcgatgtgttgcagcaatgagccttccagcgggatctggctgaattcgaccacttcggtgcggatgtcatcgccgaggtcggcgtgggtttcgtggaagctgacgatgccgcccagttggaattcaatcgggttgggcgacagcacgaacgtgcccttgccgtggattttttgcgcgaaaccccgttcctgcaactgctcgatggcgcggcgcacagtgccacggctggcctggtaggcgtccatcaattcggtttcggagggaaggcgcgtaccgcgttgcaggcgttcagtggtgatgctggcaagcagatccgtatagatctggttgtatttgctcatggagatggctctgtgcccgacgtgatgaaggtgaacggcgcgttcacggcaggaaccatagtggcacgggtagggtttgtccattagacccttggatatctgtggcttacagcgatgtgcgggaccctgacgaataaacatttttaaactcgtctgtacgagttgttgctttaactcgtacagacgagtacttttgccctcggcgtgctgccaatgactgccccccaataaaaaaaaccaagtggaaaccaagcatgagccacgactattcaaacattgcccgcgagattctcgagaacctcgggggcagcgacaaccttgagcaagctgcccactgcgtgacccgcctgcgcctggcgctcaaggacccgagcctggtcaacagcagcgcgctgaaccaggtcgatctggtcaagggttctttctttaccggtggcctgttccagatcgtgattggccccggcgaagtggaaaaggtttacgccgccctgcgcgagcagactggcctcgccgccgccaccatcgctgatgtgaagaagaagggcgccgacaaaaccaacgccatgcagcgtctggtgcgtgtgttctccgatgtgttcatgccgatcctgcccgcgctgatcatcgccggcctgttgatgggcgtgaacaacctgatgggcgccaagggcatgttcatcgagggcaagacgctgctggaggcctatccgaacctggatggcctgtggagcctgatcaacctgatggccaatacctcgtttgtgttcctgccggcgctggtgggctggtcggcggccaagcgttttggcggcagtgaaatccttggcatcgtgcttggcctgatgctcgtgcacccggacctgctcaatgcctggaactacggtaaggccgtggccgggctggacggccagagcctgccgtacttcgacattttcggttggttcaagattgaaaaagtgggctaccaagggcagatcctgccgatcctgatggccgcgtacgtgatgagcgtgatcgaaaaatggctgcgggcccgcgtgccgaatgcgattcaactgctcgttgtgccgatcactaccatcgtcgtcaccggcgtgctggctctggcgatcattggcccggtgacccgtcaccttggcatcctgatcaccgaaggcgtggtcactctattcgatttggcgccgatgctcggcggcgcgattttcggcctgttgtatgcgccactggtgatcaccggcatgcaccacatgttcctcgcggtggacctgcagctgatctccactcagggcggcacctttatctggccgatgatcgtgatgtccaacctcgcccaaggcagcgcggcgcttggcgtgttctacatgacccgcaacgcgcgggacaaaagcatggcttcgacctcggcgatctccgcgtatttcggcatcacagaaccggccatgttcggcgtcaacctgcgcttcaaattccccttctattccgcgctgctgggctcggcgctgggcagcattttcctttcgctgaacaaggtgcaggcatcggccatcggcgtcggcggcttgcccgggtttatctcgatcattccgcaatacatcccaagctttgtgatcgggatggtcatcgcgatggtcgtgccgtttgttttgacctgtgcgttgagcatgaagattgttcggccggggtatcgggtcgcctgatccaccgcaatcgcaggcaagccagctcccacctttgaatgtgttcacaaatcaaaaatgtgggagctggcttgcctgcgatgaggccctaaaggccagcacacaaataactgaaggaacccaccatgcaaaactggcaacactcggtgatctaccagatctacccaaaaagctttcacagccacgcgggtaacgccaccggtgacctgctgggcatcgtggacaagctcgactacctcaaatggctgggcgtcgactgcctgtggatcaccccgttcctgcgctcgccgcagcgcgacaacggttatgacatcagcgactactacgccatcgaccccagctacgggaccatggccgattgcgatttgctcattgccgaagcggccaagcgaggcatcaagctgatgctcgatatcgtggtcaaccacacctccatcgagcacgagtggttccagcaggcgcgcagcagcctcgacaacccgtaccgcgacttctacatctggcgcgaccagccgaacaactgggaatccaagttcggcggctcggcgtgggaatacgaagcgcaaaccggccagtacttcctgcacctgttcgaccacacccaggccgacctcaattgggacaatcccaaggtgcgcgccgaggtgttcaagctcatgcgcttctggcgcgacaagggcgtgggcggtttccgcctggacgtgatcaacctgatctccaaacccgccgacttccccgaagacaacaccgacggccgccgcttctacaccgatggcccgaacgtgcatgaatacctgcaagaaatgcaccgcgaagtcttcgaagggcatgacctgatcaacgtcggcgagatgtcgtccaccagcctcgaacactgcatccgctactcgcggccggagtcgaaagagctgtcgatgaccttcaactttcatcacctgaaagtcgattacccgaacctgcaaaagtgggtgaaggccgacttcgatttcctgcagctcaagcagattttctccgactggcaactggggatgcaggccggtggcggctggaatgcgctgttctggtgtaaccatgaccagccgcgtgtggtctcgcgttttggcgacgacggcgaacaccgcgtggtgtcggccaagatgcttgccaccgcgctgcactttctccagggcacgccgtatgtgtaccagggcgaagagctgggcatgaccaaccccggcttcaacaggattgagcagtaccgcgatgtcgagacgctgaacatcttccgcctcaagcgtgatgcgggtgaggccgaggcgtcaagcatggcggcgatcatgcagaagtcccgcgacaacggtcgcacgccgatgcagtggaataccgaggtgaacgccggtttcagcacgggcgagccgtggattggcctcccggccaacgcggcgcagatcaacgtcgaaagccagctggatgacccggattcggtgctgcatcactaccgcgcgttgatcgctttgcgtcgccacgagccgctgattcaggaaggcgtctaccgccaactgctggaggaccatctgcaagtctgggcttacctgcgcgaaggccatggcgagcgcttgctggtgctcaacaacttctacggcacgccgtgtgaaatccagctgcccgaccacgtgatcaatgccgcgcaagagcagcgcctgttgatcagtaactaccccgacagcccgcagcgcaccggcacgctgctgctgcgcccttacgaatcgtttgtgctgcacctcaaggactgagacccgcttcaacccctgcccgggagtgcagggggcttcacccaaaacataataaaaaaatatcggagtgcttcatgaaaacaacaataaagctgggcctcattgcgtcttgtctcagtgcacctttcgccgcccaggccctggagtttgccggttacctgcgtagcggtgcgggcacttcaacgggcagcggcaagcagcagtgctttcagttgccgggggcgcaatccaaataccgtctgggcaacgaatgtgagcagtatgcggaactcgaattgcggcaggacttgctgaccctcgacgacggctcggtactcagcgtggacgccatggcatcgctgtacaacaaatacgatcgcgccctgaaattccagggcgaagacaacggctcggcgcgtatgccgcagatgtatgcgcagtggtccaacctgccgagcctcaacggtggttcggtgtgggccggccggcgttactacaaacgaaatgacatccatatttccgacttctactactggaaccagagcgccacgggcggcggtgtggaggacgtgaaaatcggcgacctcaaatacagctacgccatttcccgcaaggacaacctgtaccagaaggaatacgcgactcgtcacgacttcaacgtggcaggcttcaagaccaaccccggcggcgagctggaattgggcctgagctacatcgacaaagccggcggccgcgatgccaacagcggttgggcgattactgcgcaacacgtgcaaaagcctttcctgggcggcaagaacaagttcgccttgcagtacggcgagggacccggcaccggcctcggatacaccggcgacaccacgctggacaagagcagcaaaagctaccgcgcggtggagttttttgactggcaagtgacgccgcgttttggcgggcaggttgaggcggtgtaccagaaagacattcgccccggctcgtcggaccagacatggatgtccatcggtgtgcgccctgcgtacgcgatcagcgagcagttcaaactggtcaccgaactgggccatgatcaagtcgaagccactggcggcacgcgcaaactgagcaaatttaccttcgccccgacctggtcgcccaacggcccggatttctgggcgcggcccgaagtgcgtttgtattacacctatgccacctggaacgaagccgccaagcgtgcggcgaatgagctggcggcgggttcggcgttgtccgacaccggcgcctacggcacggcgcggcatgggtcgaactttggtgtgcaagtcgaatactggtggaaataagaatgtgggtgtacgcggactaatgtgggagctggcttgtcgaatcgtcgcaccgctgcgatgcaggcgactcggtttttcatcaggaccgaagtgatgccatcgcaggcaagccagctcccacattggatcgttgttcgccctatgatttttacagaacaaaacagcaggtgaagtcatgaccgcaactcaacccctggaactgctggcgccgttgtccggtgtgctgctggcgctggacaaggtgcccgaccccgtgttcgctagccgcttgatcggcgacggcctgtgcatcgaccccatgtcgcagatcctttgcgcgccgttggccgggctgatcagcaatatccaggacagtggtcatgccgtcagcatcaccgacgacaatggcgtccaggtactgctgcacatcggcctggataccgtgaacctcgcgggcaagggcttcacgcgtctggtgcaggaaggccagcgggtggaggccgggcaaccgctgatcgagttcgatgccgattacgtggcgctcaatgcccgcagcctgctgaccctgatgttggtggtcagcggcgagccgtttacgctgttggcggaaggcctggtagagacgggtcagccgctgttgcagttatccccaggtgcggccgctgaagtgacggatgaggaagagggcgatgcactgttctccaagccgctgactttgcccaacgccaacggcctgcacgcgcgtccggccgccgtgttggcccaggcagccaaaggtttcagcgcgagcatttacctgcacaagcaaacccagagcgccaatgccaaatctctggtggcgattatggccctgcaaaccgtgcagggtgattcgttgcaggtcagtgcggcaggcgacgacgccgaagcggcgatcaagacactggtgaccttgttggctgaaggctgcggcgagacggtggcggtcgtggcagagggggttgaacccgtcgcgcccctgtcgtcggcgaccttgctacgcggcgtctgcgcatcgccgggctcggcgtttggccaggtggttcaggtggcggaaccggagcttgcgatcaccgagcagggcgccggtgaacccgccgagcgtgctgcactggagcgcggcctgctggcggctacccaggcgttgcaagccttgcaggccaaggcggtcggcagcgctcaggccgaaatcttccgcgcccatcaggaactgctcgaagacccgaccttattggagcaagcccacagcctgctggccgaaggcaaaagcgccgcgtttacctggaacagtgccaccgtcgcgaccgccacgcagttcaaggcattgggcaatacactgctcgccgaacgcgcagcagacctggccgatgtcggccagcgcgtgctgaaactgatcctcggcattcaagacagcgcttgggatttgcccgagcgtgcgattctgatcgccgagcaactgacgccgtcgcaaaccgccagcctcgacacgcgcaaagtactgggttttgtcaccgtcggcggtggcgcgaccagccatgtggcgatcctcgcccgcgccctcggcttgccggccatttgtggtgtgccggtgcaggttttagcgctggccaatggcaaacaagtcctgctggatgccgacaaaggcgaactgcacctggacccgaacctggtcgaaatcgaacagctggaagccgcgcgccaacagcagattctgcgccgtcagcgcgacgtagcccaggcgtcgttgcccgccaccacccgcgacggtcatcacgtcgacgtctcggccaacgtcgcctcgttgcaggaagtggagcaatccctgaccctcggcggcgaaggcgtcggcttgctgcgttcggagtttctctacctggaccgcaaccgcgcgccaagtcctgaggagcaggccggtacttacaccgctatcgcccgggccctcggcaccgaacgcaacctcgtcgtacggacgctggatgtcggcggcgacaaaccgctggcctatgtgccgatggaggcagaaaccaacccgttcctcggtctgcgcggcattcgcctgtgcctggaacgcccggagctgctgcgtgaacagttccgcgcgattctcgccagcgccggctttgcgcgcctgcacatcatgctgccgatggtcagcttgctgtccgagctgcatctggctcggcggattctggaagaggaagcgctggcactcggccttaccgagttgcccaagttgggcatcatgatcgaagtaccctctgcggcgctgatggcggatgtcttcgcgccccacgtggacttcttctccatcggcaccaatgacctgacgcaatacaccctggccatggaccgcgatcacccacggctcgccagccaggccgacagctttcacccggcggtgctgcgcctgatcgccgccaccgtcaaggcggcccatgcccatggcaagtgggtgggcgtgtgcggcgcgttggcgtccgaggcgttggccgtgccggtgctgatcgggctgggcgtggatgagttgtcagtcagcgtgccgttgatcccgaccatcaaagccaccgtgcgtgagctggacctggccgactgccagatcatcgcgcgccaggtgctgggcctggaagaagccgcgcaggtgcgtgaggccttgagccaataccacgcggccaccgttgaatcctcacctgttctggagcactgagcatgttcgataaattgcagcgggcgttctggaaagccctgacgccggatttgatcgccgaaaccgtggcggcgccgccgcagagtctgttgtcggcggaggtgctggcggcgttgggcggggcggataacctcaagtcgcaacaacgtgtggcgctgacgcgggtgcgcgtgcagttgcaggatgtggcgcggttggatggcgcggcgttgaaggcggcgggtgtgccgggtgtgatggtgttgaacggcggtgttgtgcacctgatcactggcctttaaggcgacaacatatcaaatgtgggagcgggcttgcccgcgatagcggtgtatcaggcaacgaatattcgtctgtctggccgccatcgcgggcaagcccgctcccacaggtttttttggggcgttacaactgcgggttatcttccggcggcttggtcttgtccacacccggcacatgcaagttgccttccaccacctggttgccttccagctgcggctgggtcacccaggtcagaatgtcgtagtaacgccggatgttcgccacaaagtgcaccggctccccgccgcgcgcgtagccgtagcgggttttgctgtaccactgtttctgcgacaggcgcggcagcatcttcttcacgtccagccacttgttcgggttcaggccgtctttcttcgcgagggtgcgcgcatcttccaggtgaccggtgccgacgttgtaggccgcgagcgcaaaccacgtacgatccggctcagcgatgctgtcgtccaattcgtccttgatcttggccaggtacttggcgccgcccatgatgctttgcttggcatccaggcggttggacacgcccatcgcctgggcggtgttctgggtcagcatcatcaggccgcgcacgccggtcttggaggtgaccgccggttgccacagtgattcctgatagccgatggccgccaacaaccgccagtcgaccttttcttccttggcgtaagcacggaaatgcttttcgtacttgggcaggcgctgctgcaaatgctgggcgaacgtgtaggcgccgacataaccgagtacatcgacgtgcccgtaatagcggtctttcaggcgctgcaacgtgccgttcttctcgaccttgtccagatagctgttgatctcgttgagcaggctgttgtcttcgcccgccgccaccgcccagctctggttgctggcgttgccgaggtcgaaggccacgcgcacattggggaagtacacctggttcattgcgacttcgttggagtccaccagggtcaggtcgatttgcccttcgtccaccatacgcagcaaatcgaccacctcaacggcgtcggactcttcgtattcaatcgcaggattctgctttttaagtgccgccaattgctcggcgtgggtgctgcccttgagcaccatgatcttcttgcccaccaaatccgccgcgttggtcgggcgggactggccgttgcggtagatgatctgcggcgtcacttccaggtaagggtgggagaaacgcacctgttgctcacgctgctcgctgctgaccagaccggcggcagccaataccggaccgttgggtttacccagctggccgaacaggtcgtcgaggttgtcggcggtctcgatttccagcttcacacccaggtcatcggcaaaacgcttgaccagttcgtactcgaaaccggtttcaccgttgcggtcctgaaaatacgtggcggggctgtttcgggtaatcacccgcaatacgccatcctccttgattcgctcgagcgtgctgggtttatcaacacaggcgctgagcatcaggaagagtccggttgcgaggagccatttggcgcatcgcgggcgcaaagcagtaggggagaacatctgcgcagtatacgcaaacgcccccccgcgccatatctcgacagcaggggacttgtctgctagcgcccgcaaaaccgggctgcagcccgcagaaatgcgggttggcgcgggtttgtgacggttaaaataactgcgcgccagcccgcggatttcgccccgataccgtgcaaaccgtgccaactgacgttcggcagcggccagccgtgccgtttcgggtgccgttggcgcaggtttacgctagaatgcacggcctcaaagcacacccccttcccgaggctgtcccgaagatgttgatcctgcgcggcgctcctgccctttctgcctttcgccacagcaaactccttgagcaactgagccaaaaggttccagcggttacaggcctgtatgctgaatttgctcacttcgccgacgttaccggcgtattgaccgccgacgaacagcaagtgctggcacgccttctgaagtacggcccaagcgttcccgttcaagagccgaccggccgcttgttcctggttctgccacggttcggcaccatctcgccctggtcgagcaaggccagcgatatcgcccgcaactgcggcctgtcgagcatccagcgtctggaacgcggcatcgccttctacgtggctggccagttcagcgacgctgaggccgagctgatcgccagcagcctgcacgaccgcatgacccagatcatcgtcagccagctggaacaggctgccggcctgttcagccatgccgaacccaagccgctcaccgcgattgacgtgctcggcggtggccgcgccgccctcgagaaggccaacaccgaactgggtctggccctggccgaagacgagatcgactacctggtcaacgccttcaacggcttgaagcgcaacccgcacgacatcgaactgatgatgtttgcccaggccaactccgagcactgccgtcacaagatcttcaacgccagttgggacattgacggcgaaagccaggaaaaaagcctgttcggcatgatcaagaacacctacgtgatgcacagcgaaggcgttctgtcggcttataaggacaacgcctcggtgatcgtcggctccgttgccggccgtttcttcccggaccctgaaacccgccagtacggtgcggtgcaggagccggtgcacatcctgatgaaggttgagacccacaaccacccgaccgcgattgccccgttcccgggcgcagccaccggttcgggcggcgaaatccgtgacgaaggtgcaaccggccgtggcgccaagcccaaggcgggcctgaccggtttcaccgtgtccaacctgcagatcccaggcttcgaacagccgtgggaagtgccgtacggcaagcctgagcgcatcgttactgcgctggacatcatgatcgaaggcccgctgggtggcgccgcattcaacaacgaattcgggcgtccggcgctgaccggttacttccgtaccttcgaacagtccatcaccaccccgcgtggcgacgaagttcgtggctaccacaagccgatcatgttggctggcggtatggggaacatccgcgaagaacacgtcaagaaaggcgagattctggtcggctccaagctgatcgtcctcggcggcccggccatgttgatcggcctgggcggcggcgcggcttcctccatggccaccggcaccagctcggcggacctggacttcgcttccgtacagcgcgaaaacccggagatggagcgtcgctgccaggaagtcatcgaccgttgctggcagttgggtgacaagaacccgatcagcttcatccacgacgtcggcgccggcggcttgtccaacgccttcccggagctggtcaacgacggcgaccgtggtggccgtttcgaactgcgcaacattccaaacgacgagccgggcatggccccgcacgaaatctggagcaacgaatcccaggaacgctacgtgctggccgtcggccctgaagacttcgcgcgcttccaggccatctgcgaacgcgagcgttgcccgttcgccgtggtcggcgaagccactgccgagccgcagctgaccgttaccgacagccacttcggcaacagcccggtggacatgccgctggaagtgctgctgggcaaagccccgcgcatgcaccgctccgccgtgcgtgaaaccgagctgggcgatgatttcgacccaagcacgctggaactggccgacagcatcgaacgcgtgctgcaccacccggccgtggcaagcaaaagcttcctgatcaccatcggcgaccgcaccatcaccggcctggtggcccgtgaccaaatggtcggcccgtggcaggttccggtggctgacgttgccgtcaccgccaccagcttcgacgtgtacaccggtgaagccatggccatgggcgagcgtacgccgctggccctgctggacgccccggcgtcgggccgcatggcgattggtgaaaccctgaccaacatcgcggcttcgcgtatcggtaaattgtctgacatcaaactgtcggccaactggatgtccgctgccggtcacccgggtgaagacgcgcgcctgtacgacaccgtcaaggccgtcggtatggaactgtgccctgaactgggtatcaccattccggtgggcaaggactcgatgtccatggccactcgctggaacgaagacggcaccgacaagagcgtgacctcgccgctgtcgctgatcgtgaccggtttcgcgccggttaccgacatccgccagaccctgaccccgcaactgcgcatggacaagggcaccaccgatctgatcctgatcgacctgggccgtggccagaaccgcatgggcgcctcgatcctggcacagacccatggcaagctcggcaagcaggcaccggacgtcgatgacgctgaagacctcaaagccttcttcgccgtgatccagggcctcaacgctgacggccacctgctgtcctaccacgaccgttccgatggcggcttgctgaccagcgttgtggaaatggctttcgccggtcactgcggcctgaacatcgtgctcgacagcgttgccgaggatgcatctgaaatcaacggcatcctgttcaacgaagagttgggcgccgtgatccaggttcgccaggacgcaacgccagacgtactcgcccagttcagcgccgccggcttggacgactgcgtggccgtgatcggccagccgatcaataacggcgagatcaacatctccttcaatggcgatacggtgtttgccggccagcgccgtttgctgcaacgccagtgggctgaaaccagctaccagatccagcgcctgcgtgacaacgccgactgcgccgagcaggaattcgacgtgatcctggaggaagacaacccgggcctgagcaccaagctcagcttcgacgtcaaccaggacatcgccgcgccttacatcaagaaaggcatccgcccacaggttgccgtgctgcgtgagcagggcgtcaacggccaggtggaaatggcggccgcgttcgaccgcgccggcttcaatgcgatcgacgtgcacatgagcgacatcctcgccggtcgcgttgacctcaacgagttcaaaggcctggtggcctgcggcggtttctcctacggcgacgtgctgggtgccggtgaaggctgggccaagtcggccctgttcaacagccgtgcccgcgacgcgttccagggcttcttcgagcgcaacgacagcttcaccctgggtgtgtgcaacggttgccagatgatgtccaacctcagcgaactgatcccgggcagcgagttctggccgcacttcgtgcgcaaccgttccgagcagttcgaagcccgtgtcgccatggtgcaggtgcaagagtccaactcgatcttcctgcaaggcatggccggttcgcgcatgccaatcgccatcgctcacggtgaaggccatgccgagttcgaaagcgaagaagccttgctcgaagccgacctgtccggttgcgtggccatgcgtttcgtcgacaaccacggcaaggtcaccgagagttacccggccaacccgaacggctcgccgcgcgggatcaccggccttaccagccgcgacggtcgcgtgaccatcatgatgccgcacccggagcgcgtgttccgcgctgtgcagaactcgtggcgcccggaagagtggaatgaagacggcgcctggatgcgcatgttccgcaacgcccgcgtgtgggtgaactaaggccgtgtacaagctcgccttcttcgtacccgacagccatgtggagatggtgaaaaccgccgtcttcgctgccggcggcgggcgcatcggcaactacgacagctgtgcctggcaggtgctgggccagggccaattccgtgcgttggacggcagccagccgtttatcgggcaggttggccaggttgaagcggttgaagaatggaaggttgagctggtggtggcggatgagttgattgtggctgttgtagccgctttgaaactcagccacccgtatgaaacaccggcgtatgaggtgtggcagttggcggatttttgattcgcacgctgcattcacaagaaacccgctgggccagtttggtcagcgggtttttttgttggctgtaagggcctcatcgcaggcaagccagctcccacattttgatctgtgaatacattcaaatgtgggagctggcttgcctgcgataaggtcagtccaagcagtgatgattcacaccctggcaccgacttcacggccactgaccaaccgctccagcgcctcacccagtccagtggccttgtcaccaatcaacaagtgccaaaccccactgtccagctggctcacaccctggcaacccagtgcactcaggtcagcctcagacaacaccgagtcatcccccaactccacccgcaaccgcgtcatcgccacggcttccagctggcgcacgttcccgcggccacccagcgcattcagccacttctcggcctcttgcacgttcaccacaaccggcttatccacaggcgcaactgcgacaggtgcactggcaacaaatgaaggcatggccaagcgaatctcatcggcaatgctgtcggccatcggcccgaccaccacctgcaaactcccgccattacccggacgaaccaccgccatggcacccagtgctttcagctcggcatccacagctttattgcgatccaccatgtccagacgcaggcgcgttgtgcacgcgcccacactcagcaagttggtcgcgccacccagcgcacggatgtaggcgctggcccgctggttatccgtcatcacctcggcctgcaccacctggatatcttcacgccccggcgttttcaggttgaaccggcgaatgcagtagttgaacacgctgtagtaaatcactgcgtacgccaacccgaccgggaacaccagccagccgttggtggacttgccccaacccagcaccatgtcgataaacccgccggagaaggtaaagcccaagtggatgttcagcaggttggtgaccgccatcgacaggccggtcagcaccgcgtggatcaggtacaggaacggcgcgaggaacatgaacgcaaattcaatcggctccgtcaccccggtcaggaacgaggtcagcgccatcgacagaaagatcccgcccatgaccttgcggcgttccggcagtgcattgcggtacatcgccaggcacgcagccggcaggccgaacagcatcaccgggaacatgccggtcatgaactggccgcctttcgggtcgccagcgaagtagcgggtcaggtcgccggtcaccacggcgccggtcaccggatcggtgaaactgccaaatacaaaccacgccatgttgttgaggatgtggtgcaggccggtgacgatcagcaggcggttgaacacgccaaacacgaacgcgccaaagctgccgctttccatcagcagcacgccgaagctgttgatgccatgctggatcggcggccagatcaggccgaagatcacgcccagcgcaaccgccgaaaacccggtgacaatcggcacaaaccgtcgcccgccaaagaacgccaggtactccggcaacttgatgtccttgaaacggttatacagcccgcccgccatcaagccgctggcgataccggcgagcatgcccatgttgatggtggtgtccatcaccttgagcgtggagaccatcaccaggtagccaatcgcaccggccaggcccgccgtgccgttgttgtcgcgggcgaaacccacggcaatgccgatggcgaaaatcagcgccaggttggcgaagatcgcctgccccgcgtcgtgcatcacggcgatgttcaaaaggtcagtgtcgcccaggcgcagcagcaggccggcgatcggcaagatcgcaatcggcagcatcagtgcacggcccaggcgttgcaggccttcgatgaaatgttggtacatggcgagtctccttttcttgttgttgtcagctcagcggccagtggtgttgacaggcttggcgaacggctttggcgctgctcaggtcgagcaggcctcggctgatttgccggcattgcgccgcgtccaggtggcggacgcggtccttgatttctccgatctgcagcgggctcaccgacaactcgctgacccccaggcccaacaatacgggcgtggccagcgggtcggaggcgagggcgccacacacgccgacccaacgcccgtgtttggcggcgccggcgcaggtctgggcgatcagccgcagcagcgccgggtgcaaggcgtcgacccgcgcggcgaggccggcgtggtcgcggtccatggccagggtgtactgggacaggtcattggtgccgatggacaaaaagtctgcgtgcttggcgagttgctcggccatcagcgcggcggcgggcacttcgatcatcacgcccagttcggggcgctgggtcagttccagctcggcgcacaattcgtccaggcgttggcggatctgcagcaactcatccacttcgctgaccatcggcagcaggatgcggcagcgctccagcggagacacttgcagcagtgcgcgcagttgctggtcgagcacgtccgggcgtacttgcgccaagcgaatcccgcgcaggcccagcaccgggttggcctcgacgggcagcggcaggtagtcgagctgtttgtcgccgcccacgtcgatggtgcggatgatcaccgacttgtcgcccatggcatccagcacggcctggtaggcgtggcgctgctcttgctcgtccggcgcggtgcgacggtcgacgaacagaaattcagtgcgcagcaggccaacgccgtcggcgccgttttcaaatgccacctgagcttcggcgctggaagccacgttggcagcgacttcgatggtcacgccgtcggtggtacgcgccggttgttgggcctgagcctgttgctgttggcggcgcagtttttgtgcgtcacgaatctggtgcacttcggcgtggcgcgcctcgctgggcgccagctccaggcggccgttggcggcatcgagtaccacgcgttggccttgggggatgtcgagcacttcattgcccaacgcgaccacacagggcaagcctttgccccgcgcgaggattgccacgtgggacgtcgcgccgccttcggccatgcaaatgccagcagcctcttgcgcactcagttgcagcaggtccgagggggtcaattcatgggcgctgataatggcgcccgccggcaattcgaagtgccaggcttcacccagcagtgcacgcaacacacgctgttgcaggtcacgcaggtcattggcgcgctcggcaaacagtggcttgcccaatgccagcaacaccgcgcactgggcctggatcgcatcgcgccacgcgtgagtggccgcgctgccggtttcgatggcgccggtggcggcttccagcagggtcgggtcttcgagcaaagccaggtgcgccgcgaagatctcttcttcctcaacgtttttgcgctggcgggcgtggtccagggtgctgcggatttcaccgcgtacctgttccagggccgtgtccaggcgttgcagttgttcatcggcggcgtggtggccggtgtcttccggcagctcgatgccggccaggcggaacagcggcccgcagaccaggcccggtgccgcacacacaccttgcagcacatcggcttcggtattcatccgacgcgcagccacgaccaccggtgcgtgatgttcttctttaactgcgactgacaacgcggccaccaacgcctgcaaggcggcctcggcgtccttgccgcgacagctcacgcgcacttcgtcgccctcgccaatccccaaccccagcaagccaatcaggctgtcgcacgcggcggacttaccggcgtaatgcagatgggcctggctgctgaaaccttgtgcagtcttgcggatcaatgcggcggggcgcgcatgcaggccgccacggtgggtaatgcgcacggtggcgcgcacttcggtgaccgagttatccacaaccgccggcttggcagcggtcgaacgcgccactatttgcaacaacggctcgccaaccttgacggtgtttgtggtgatgggcagcagctcaaaaccgtcgccattggtcaggatgatcaggctgaccaggcttttgcactggcgcgcaatgcggtccagatcaaactgcaccagcgcctggcccttgctgacccgcgcgccttctttcaccagcaacgcaaagccttcgccgttgagttctaccgtgtcgatgcccacgtgcatcagcacttcggcgccgttttcggcgcggatcgtcacggcatgcccggtgcgcgcgacgtggatgatcaccccgtcacagggcgcgtgcaggcagtcgttcaaagggtcgatggcaatgccgtcgcccatggcgccgctggcgaacacttcgtcgggaacgtcgcccagggtcagcaccgggccactgaggggggcgctgagggtcaattcattattgttgtaggacatgggcacggtactcatcaggaaagcgcgactcagtgagtgcgggtaactttgctcaggtggcgcggctggtccgggtccatgccccgggcaaccgccaggcctgcagccatgacgtaaaagctttggatcgccaggatcgggtccaggctcgggtgttcggcgcggctcagggtcaggtcgcgttcggtcacgtcgtccggcgcggccagcaatacacgggcgccgcgctggcgcatgtcggcagccaggctcaacaggccggcctgctcggcaccgcgtggggcgaacaccagcagcgggtagttttcgtcgatcaacgccatcggcccgtggcgcacttcggcgctgctgaaggcttcggcctggatcgccgaggtttccttgagcttgagcgcggcttcctgggcgatgccaaaaccggcgccacggccgatcacgatcaggcgctggctgtcacgcaaagcttcaatggcggcggaccaatcctgagtcgccgcttcacgcaaaccctcgggcagggcctggcaggcttgcagcaataacaggtcctggttccagtggccgatcaactgcgcgctggcgctgagggtggcgataaaactcttggtcgcggccacgctttgttccggcccggcacacagtggcacgtgaaattcgcaggcggcttccagtggcgagtcttcggcgttgaccatcgaaatgctcaaggcaccgcgtttgcgcagcaggcgcaggctgttgaccagatccgggctttgccccgactgcgagaaaccaaaggccacttggccgctgaccttcaacggcgcttgcagcaaggtcaccaccgacatcggcaacgacgccaccggaatgcccacgtgctgcatggcgatgtaggcgaagtaactggcggcgtggtccgagctgccccgggcgatggtcatcgccacttgcggcggctggcggcgcaggcggccggcgacttcttccagcatcgggcccaggcgttgcagttgcgccgcgacggcgtcagaggaggccagggcctcttcaagcatttttgaagtcaatggtttctccttcgaccattacgtcggtgagtgtcagggagcggtccaggcgcacgctgtctgcaaagctgccgggttgcaggcggccgcgttcttccaggcccaggtagtccgcaggaaattgcgacaggcgttgtgaggcttcgctgatcggcaggccgattttcaccaggttgcgcagcgcctggtccatggtcagcgtgctgccggccagggtgccgtcgggcaagcgtacgccgcccaggcatttggtcacggtgtggctgcccagcttgtattcgccgtcgggcatgccggcggcggcggtggaatcggtgacgcagtacaggcacgggatggaacgcagggccacgcgcatggcgccggggtgtacgtgcagcaaatccgggatcaattcggcgtatttggcgtgggccagggcggcgccgacgatgcctggctcgcggtggtgcagcgggctcatggcgttatacaagtgcgtaaagctggtggccccggcggcgagggcggcgacgccttcttcataactgcccagggtgtggccgatctgcatgcgcacaccgcgttcgctgagggcgcggatcagggcgtcatggccggcgatttccggcgcgatggtgatcacccggatcggagccaggcgcagataggcttccacttcagccatcaacgcggtgtgggcgaagttgggttgcgcgccgagttttcccgggttgatgtaagggccttccaggtgcacgccgaggacgcgggcgctgcccgtcgggcgtttctcgcagaaagtgccgagttcgccgagtacacgggagatttcctccaccggcgcagtcatggtggtggccagcagcgacgtggtaccaaagcgcacgtgggtgcgggtgatggtctcgaacgcggcggtgccttccatgatgtctttgccgccgccgccgtgtacgtgcaggtcgataaagcccggcagcacgtaaggcaggtcgttttcagccgggtcgcaaggcacgccgtcgatggcgatcaccttgccgtgctcgtgcaccaagcggccacgaacccagccgctgggcgtgaggatgttgtcttcggacatgggcagttctctaaattcgcagttcagcggaatagtcgtggcggcgcagctctgcgacgaagtcgtagtagtcgttgcggcagtaggtgtcggtgatttcaatcggcgtgttgtcggcggtgtagcccacgcgggtcatcagcagcatggcggtgccgggcgcgatgcccaccagcctggcgaattcgtccgaggcgttgatggcctgcacatgctgcagggcgcggacgatgggcttgccgatgctttcaaagtattcatacagcgagctgcccagggcttgcggttgcggcagtaccgacgcagggacgacggtcatttcaattgccatcaccgtgtcgtcggctttgcgcaaacgcttcattcgcgccactttgtcgctggtggacaggcacaggcggatcagttcttcgtgggtcggcggcgtgatgtcgcgttccagccacagcgagctgggcacgaaccccttgaggcgcagcatttcgctgaaaccggaaaggcgtgagagcggttgttccagacgcggtgtgataaacgtgccggagccctggctgcggcggatcaggccttgctcaaacaacacctccagcgccttgcgggcggtcacccgtgaaatgctcagctgttcactgagggcgcgttccgagggcagtgcctgttcggaggtccactggccggcgtggatggccgcttccagcttgcgcgccaattgcaggtacagcggcgtggattgtttgtcgtcggggcgtaagccctggatgggattcatcgttaaggtttccgatgcgttattggagtgttgtcgcccggtattggccggaaattaataccacttaaataccatgtcaatgcagtcaaaacagtgcagacaatggatttagggccctgtaatggggcttgccatgaagtggtattagagaggtctgtatcgcgcgtagaacggcgcagcccggcgcggtgaactggtattcaccggccggcgctgcctggggcaggaattattttcgaattattttacgaacggtcgcggattacggccggatctcgatcatggtgccgtctttgaccaggttccagacttcgcgcatatccacgttgcgcatgccgatgcagccgtcggtccagtccagggtgtgaaaccactgttccgggtattcctcggtgtcaggggtgccgtggatcatgatcatgctgcccggcctcacaccctcgcgacgcgcgcgggcggagtcgctgatattcgggtaggaaatgtgcatggccaggttgaagcggtcgctggtcttgcgccagtcgatccagtagaagccttccggtgtgcggcggtcgccttcgaactgtttggtgcccttggggtttttgccgagggaaatgcgataggtcttgagcggcttgccgtcgttgatcagctgcaattggtgggcggacttgagtaccaggattttttcgacaggtttgccaccgaggatttgcaccgtggaggctgaagaaaaggccgcgaaaaacacgcagatcagagcgagcaacagacgcatgaaaacggtttcccttagcggccatttgccggttttttattcggtgggtttgcccatgggcggtacagcttcgctgcgcaccgggaacgcctgttggcgacggtcagcgaaaaagtattctagagtacgcccgaccgtgcggaaagccagcgctgaccaagggatgtcggcttcatcgaacagcttcacttcgaggctttcggggccggcggcaaagtcgaggtcaaccagctcggcgcggtagaaaatatgcacctggctgatgtgcggcacgtcgatcagggtgtagatgctcaggttgcgcacgcgggcgcaggcttcttccagggtttcgcgggcggcggcctgttccacggtctcgccgttttccataaagcctgcgggcagggtccagtaacccaggcgcggctcgatggcgcgacggcacagcagcactttgtcgccccacaccggcacggtgccggcgacgatattggggttctggtagtggatggtcgagcagtggtcacacacgtaacgcaggcggccgtcgccttcgggaatacgctgggtaaccggtttgccgcactggctgcagaagttcatgctggggttcctggagagtgcgcctatcttggcgtggcaggcggggccctgcaagttgtcgtttagcgacatgcccagggttttggggttgggcgcccgcccgctttggtgcatgatgcaaggtagccaacagaccgagatgactcatgctggacgagctacttcgccgggtaagcaaccacaccccccacacgctggaaaccgacgggcgtttccccgaggccgccgtgctggtgccgattacccgcagcgacgaacccgagctgatcctgaccctgcgcgccagcggcttgtcgacacacggcggcgaagtggcgttccccggcgggcgccgcgacccggaagacccggacctgatcttcaccgccttgcgcgaagccgaagaggaaatcggcctgccgcccggcctcgttgaagtcatcggcccgttgagcccgttgatttccctgcatggcattcgggtcacgccgtatgttggcgtgatccccgattacgtcgaatacctggccaacgatgccgagattgctgccgttttcagtgtgcctctggactttttccgacaagacccgcgcgaacatacccacagaatcgactaccagggccgcagttggtatgtgcccagttaccggttcggcgaatacaagatctgggggctgacagcaatcatgatcgtcgagctgatcaacctgctctatgacgatgccaagatcagcctgcaccagccgcccaagagcttcatcaatatctaagccatcgcttgaatggccagccgtgaggaaaaaccatgaaataccgcctgggcgacgcccgcgtcgagacgcacccgaaaagctgggtggcgccgaatgccacgctggtcggcaaggtcaagctggaggagggcgccaacgtctggttcaacgcggtgttgcgtggcgacaacgaactgatcctgatcggcaagaacagcaacgtgcaggacggcagcgtgatgcacaccgacatgggttacccgctgactctgggcaccggcgtgactatcggccataacgccatgctgcacgggtgcacggtggatgattacagcctgatcggcatcaacgcggtgatccttaacggcgcgaagatcggcaaacactgcatcatcggcgccaattcgctgatcggtgagggcaaggaaattccggatggttccttggtgatgggctcgccgggcaaggtggtgcgtgagttgaccgaggcgcagaaaaagatgcttgaggccagcgccgcgcactatgtgcataacgcgcagcgctacgcgcgtgacctggctgagcaggaagaatgaacccgattgaacgccccgtcgcctcgccatgcgtgagcatttgcgcgctggacgatgatgatatttgtacgggttgccagcgtacggtggatgaaattacgcgctggagccgcatggacaatgccgagcgccgggtggtgttggggttgtgtcatgagcgggcgaaggagagtgggttggtgtggatggtttccgggaaatccagcgtctgaaccactgctatcgcaggcaagccagctcccacagtttgaattgtgaataccttcaaatgtgggagctggcttgcctgcgatgaggccctgtcagacgacatccctgtaattgtgtaccctgtgcggcattacccacaggtccatcccccatgctcttcctgatcgcctacatcagcagcgtcgtgctgatcaacttcgccttctccaccgcgccgcacctggacatcatctggtccgcctggggcggcctggtcttcatcctgcgcgacatggtgcaaacccgctttggccacggcgcaatcatcgccatgctggcggcgctggtgctttcctatgtgacctccgacccggccattgccctggccagcgccaccgcgttcgcggtgtctgaatgcatcgactggctggtgttcagcatcaccaagcgcccgttgcatgaccgcctgtggatcagttcggcgctgagcattccccttgatacctttatcttcttcggcctgatcggcgcactcacgccagccgtggcgggcaccgcgctggtgtcgaaattcgccggggtcacggtggtgtggctgatcatggcctggcgcttgcgcaaacgggctgtcgccaactgaggccaatttttacagttcatgtaaaatgccgacctttctccccatgatccgctcccctgaggacctgagatgacccgaatcggaactccattgtcgccaaccgcgacccgcgttttgctgtgtggctgcggtgagctgggcaaggaagtggtaatcgaactgcaacgcctgggcgttgaagtgattgccgtggatcgctacgccaacgcgccggccatgcaggttgcgcaccgtagccacgtgatcaacatgctcgacggcgccgccctgcgtgccgtgattgaagccgagaaaccgcacttcatcgtgccggaaatcgaagccatcgccaccgccaccctggtcgaactggaagccgaaggcttcaccgtgatcccgaccgcgcgcgccacttcgctgaccatgaaccgtgaaggcatccgtcgcctggccgccgaagagctggacctgccgacctcgccgtaccacttcgctgacactttcgaggactacagcaaggctgtgcaagacctggggttcccgtgcgtggtcaagccggtgatgagttcgtcgggcaagggccagagcctgctccgcagcgttgatgacgtgcagaaagcctgggactacgctcaggaaggcgggcgtgccggtaaaggccgcgtgatcatcgaaggctttatcgacttcgactacgaaatcaccctgctgaccgtacgccacattggcggcaccacgttctgtgcgccggttggccaccgtcaggagaagggcgactatcaggaatcctggcagccgcaagccatgagcccgattgctctggctgaatccgagcgcgtagccaaagcggtgaccgaagcgctgggtggccgtggcctgtttggcgtggagttgttcatcaagggtgatcaggtgtggttcagcgaagtgtcgccacgcccgcatgacaccggcctggtgactctgatttctcaggacctgtcgcagtttgcgctgcacgcgcgcgcgattctgggcctgccgattccgttgatccgtcagttcgggccttcggcttcggcggtgattctggtggaagggcagtcgactcagacggcgttcgccaacctcggcgctgcattgagcgaaccggacacggcgttgcgcctgtttggcaaaccggaagtgaatggccagcgccggatgggtgtggcgttggcgcgggatgagtcgattgaagcggcgcgggccaaggcgacccgtgcttcgaaggctgttgtcgtagagctgtaaccgagtcgcgcccatcgcaggcaagccagctcccacattttgaattgtgaatgccttcaaatgtgggagcgggcttgcccgcgatagcggtctatcaagcgaccttgttcaaatcgttatcccgcgtttctttcaggcacaacacagcaatcaagctgagcaccgctgccgccgatacatacccgcccacataactcagcccacccatcgctaccagcttggtcgcgaaaaacggtgcggccgaggcgcccacaatcccgcccaggttatacgccgccgaagcaccggtataacgcacgcgcgtcgggaacagttccggcaacatcgcgcccatcggggcgaaggtcacgcccatcaggaacagttccaggctcaggaacagcgcgaccgcccacgtcgagccgtgggtcagcagtggctccatggtgaagcccgacaggatggtcagtatcgcgccgacaatcagcaccggcttgcgcccgaagcggtcgctggcccaggcggcaatcggcgttgccaggcccatgaacagcacggcaaagcacagcaggccgaggaaggtttcgcggctgtagcccagagtcgacacgccataactcagcgaaaacgcagtggtgatgtagaacagcgcgtagcacaccaccatcgatgcggcgcccagcaaaaccgggacccagtgttggctgaacagttctaccagcggcactttcaccggcgcttctttggccacggcattggcgaataccggggtttcatgcagtttcaagcgcgcatacaggccgaccatcaccagcgcggcgctgaggatgaacgggatccgccagccccagctgcggaactgttcgtcgttcaggctcatggccagaatcaggaacaaaccgttggccgcgagaaagccaatcgacgggcccagctgcgggaacatgccgaaccacgcgcgcttgcccttcggtgcgttctcggtggccagcaacgccgcgccgccccattccccgccaaggcccaggccctgaccgaaacgcagcacgcagagcaggatcggcgcccaggccccgatgctgtcgtagcccggcagcaagccgatcagcgtggtgcacacgcccatcagcagcagcgaggcgaccagtgtggatttacgcccgatgcggtcgccgaagtggccgaacagcgccgagcccagcgggcgggcaataaaggcaataccgaaggtcaggaatgacgccagcatctgcgcagtgccggaggtctgcgggaagaacaccggcccgatcaccagtgcggctgccgtggcgtagatatagaagtcgtagaactcgatcgcggtgccgacgatgctcgcggtcgcgacccgtgcggtggagttgctcggggcagcggtcgcggcctcgttataggtggtgctcatggaggtatccctgacggtcgttgcgcgtttggtcgcggattattattgtcgaacactcttatgtcggagtgtgcgcggagcggctcgggatgggagcaaacaccggtcagacgataaagcaatgcctggacgcgctgagtgcgggtagcacgcggtctggcggggctttggtaagccgtggcgattataggaaggggtttgcggatccaacaagtagctcaagcgctgcaaatcaaaatgtgggagctggcttgcctgcgatggcgtcacctcagtgtcactgatacaccgaggtgcccgcatcgcaggcaagccagctcccacacaagccagtgctcacatgaaatgggttgaatcaggcggcgacgggcactcggctggtgtgccagatcaacaccttgctcacgcggttgtcctcggtctcaaggatttccaggcgatagcgaccgattttcaggcacacggcgcagtctggaatggtttccagcgcttcggtaaccaggccgttgagagtcttggggccgtcgctgggcaggtgccaacccaggcttttgttcaggtcgcggatcgaggcagcaccgtcgatgatgtagcggccgtcgggctgcgcctcgatatgcgggttatccacagcctgatcgctttcgaattcgccgacgatttcttcgaggatgtcttccagggtcacgatgcccagcacttcaccgtactcgtccaccaccatgcccaggcggcgctgctgtttgtggaagttcagcaattgcagttgcaggggggtgctttccgggacgaagtagggttcgtggcaggcggcgagcaaggcttccttggtcaggctggcatcgggcagcaggtgttggatctgccgggtgttgagcacggcttcgacctggttgatatcactgtgaaataccggcaggcgtgtgcgctcagaggtacgcagttgctcgatgatctcctcgaccgagtcatccaggttgataccgtccacttcactgcgcggcaccaggatgtcgttgaccgtgatgttgtccagtgcgtgaatgccgggcatgccgggcgtacgattttcgtcggcctcgggctcgggttcatcgtcgtggtcgggcaaaggctcgtcgctctttttcaccacgccggatgtgcgtgcgaacgggcgcagcaataacaggctgatgccattgagcagccaggccagggggtagaggattttcagcggcacgcccagcagcgtattgccaaaacccagtacggcttgcgggtggcgaaccgccagggcacgcggcaggtagtcggcgaggatcagcaaaatggcgcaagagatcagccagccgagccatggcccgttctgcgcccaggcgtagatggcgagcagcgtgcacagaatcaccacggcggcgcggcacaggctgttgcacaggatcaggctgttacgcggaaagctcaggcgggcggcggccttgtcaccctggcgtgtgccggggcgcagggccagcaggtgctgttgcgcggcttcgatggcggtaaacagcgccgcccacaaaaccagcaaggcgattaccgcgagcatcggccccaagggcaagttgtccatgatcgctgcccgtcagatatgcaggatgtattcgcgaaccagcttgctgccgaaataggccagcatcagcaggcagaaaccggccaaggtccagcggatcgccttgtgcccgcgccagccgaggcggttgcgcccccacagcagcacgctgaacaccacccaggccaggcacgccagcagggttttgtgcaccaggtgctgggcgaacaggttctcgacgaacagccagccggaaatcagcgacagcgacagcagcgtccagcccgcccacaggaagccgaacagcaggctttccatggtttgcaacggcgggaagtttttgatcagcccggacggatgcttgtttttcagctggtggtcctgcagcagcaggagcagcgcctggaacaccgctatggtgaacatgccgtaggcgaggagcgacagcaggatgtgggcgaggatgcccggctcttcatcaatgacctgcacggtgccggtcggcgcgaattgcgcgagcaggaccgtcagcatgcccagcgggaacagcaggaccaacaggttttcgacgggtatccggtagcaggccagcagggtcagcgcgatcacggcggcggcgatcaggctggcggcgctgaagaagtccaggcccaggccgaccggcgtcatcaagtgggtaaacaggctcgcggcatgggccagcagggccaggacaccaaggccgaccagcaggcgtttgtccgccttggtgccttgggcaagacgagtgccctgatagagggtcgcagcggcgtacaaaagggcggcggcgaggctgggtagcaaactgggtgacaaggggaccataaatcctgatagacaagcccgaaaggcgctgagtttggcatacccctgcgttccacgaaagactcccgggccagacagcgggtgtgcaccggcgcagtcttcgctataatccgcgacctgcccacgccgcaggctcgccgagcgctgtttttaatagcgatttaccacagcctgggccgccattacctcggtctatgaatagggcctgaaaggatcgcgcatgtttgaaaatctgactgaccgtctctcgcagacgctgcgccatgtaaccggcaaggccaagctgaccgaggacaatattaaagacaccctgcgcgaagtgcgcatggcgttgctggaagccgacgtggccttgcctgtggtcaaggacttcgtcaactcggtcaaagagcgcgcggtgggcactgaggtgtcccgcagcctgacgccgggccaggccttcgtgaagatcgtccaggctgaacttgaaagcctgatgggcgcggccaacgaagatttgaacctcagcgccgtgccaccggccgtcgtgttgatggccggcctgcaaggtgcgggtaaaaccaccaccgccggcaagctggcgcgcttccttaaagagcgcaagaagaagtcggtgatggtggtatcggctgacgtttaccgtccggccgcgatcaagcagctggagatgctcgcgggcgaagtgggcgtgaccttcttcccgtccgacctgagccagaagccggtcgacattgccaacgcggctattaaagaagccaggctgaaattcatcgacgtggtcatcgtcgataccgccggccgcctgcacatcgacgaagagatgatgggcgagatcaaggcgctgcatgccgcgatcaacccggtcgagacgctgtttgtggtcgacgccatgaccggtcaggatgcggcgaacaccgccaaggccttcggtgatgcgctgccgctgaccggcgtgatcctgaccaaggtcgacggcgacgcccgtggcggtgccgcgctgtcggtacgcgccatcaccggcaagccgatcaagttcatcggtatgggcgagaagagcgaagcgctcgagccgttccaccctgagcgtatcgcctcgcgcatcctcggcatgggcgacgtgcttagcctgatcgaacaggccgaagccacgctcgacaaagacaaggccgacaagcttgctaaaaagctgaagaagggcaagggcttcgacctcgaagacttccgcgatcagctgcaacaaatgaagaacatgggcggcctcggcggcctgatggacaagctgccgaacatcggcggtgtgaacctggcgcaaatgggcaatgcccagggtgcggcagagaagcagttcaagcagatggaagccatcatcaactccatgaccccggccgagcgccgcgaccctgagctgatcagcggttcgcgcaagcgtcggatcgccatgggttccggcacccaggtgcaggacatcggtcgcttgatcaagcagcacaagcagatgcagaagatgatgaagaaattctccgccaaaggcggaatggccaagatgatgcgcggcatgggcggtatgttgcccggcggcggcatgccgaaaatgtaaagtattcgagcgcaagcacgcttgcgctccgacccacagggacgtgggatctccagcaaacccgcagtcagcgggagctgaccagccgttttaaccgacggctctatagcagatctgaatggcacactgataggcgccagaaaaagacatttgcaaaagtccggatattccttagaatatgcggcctttcgggcacctatgcccgctgtgcatttagatttgcagcaccgactacaggaacgatgttcacatgctaacaatccgtcttgcccttggcggctccaaaaagcgcccgttttaccacttgaccgtaactgacagccgcaacccacgtgacggctctcacaaggaacaagttggcttctacaacccgatcgctcgtggtcaagaagtccgcctgtccgtgaaccaagagcgcgtagcctactggctgagcgttggtgcacagccttctgagcgtgttgccaagttgttgaaggactcggctaaggccgcagcctgagcaatatgaacgcgacgccaaccgttgctgatgatttgatcgttatcggcaagatttactctgttcatggcgttcgcggcgaagtgaaggtgtattcctttactgatccgactgaaaacctgttgcagtacaaaacctggacgctcaagcgcgaaggtagtgtgaaacaggtcgagctggtcagtggacgcgggagcgataagttcctggtcgcaaagctcaagggtcttgatgaccgtgaagaagctcgtcttctggccggttatgagatctgcgtgccgcgagacctgttccctgaattgaccgatggcgagtactactggtaccagctggaaggtctgaaggttattgatcaactcgggcaattgttcgggaaaatcgatcatcttctggaaaccggcgccaatgatgtaatggtggtcaagccttgcgctggcagcctggatgatcgtgaacgcctgttgccttatacgaagcaatgcgtgttggccgtcgacctggcagcgggcgagatgaaggtggaatgggacgcggacttctaagcgtggctaatttgcgcattgaagtgatcagtttgtttcccgagatgttttccgccatcagcgagtacggcatcaccagtcgggcggtgaaacaggggctgttgcagcttacctgttggaatccgcgagactacacgacggatcgacatcacactgtggacgatcgcccatttggcggtggcccgggcatggtgatgaagatcaagcccctggaagacgcactggttcaggccaaggctgctgccggggagaaggcgaaggtaatttacctgtcccctcaaggccgtcagctgaaacaggctggggtgcgcgaactggcgaatgaggaagcactgatcctgattgccggtcgctatgaaggcatcgacgagcggtttattgaagctcatgtcgatgaagagtggtcgattggggactatgtcctgtctggcggcgagctgccggcgatggtcctgatagatgcggttacacgactgctgcctggagctttagggcatgcggactccgcggaggaagattccttcacggatggtttgctggattgcccgcactacacccgaccggaggtgtatgcggatcagcgtgttcccgacgtattgctaagtggcaatcacgcacacatccggcgttggcgtttacagcagtcccttggtcggacctatgaacgacgcgccgatcttctggaaagccgctcgctttctggagaagagaagaagctgctcgaggaatacatcctcgcgcgggacgatagttaacaacgtatcgatggtaggtccattgacttaccttaggagcacagcatgactaacaaaatcatccttgcactcgaagcagagcagatgaccaaagagatccctacctttgccccgggcgacaccattgtcgttcaggtgaaagtgaaggaaggcgaccgttcgcgtctgcaagcgttcgaaggcgtggtaattgccaagcgtaaccgtggtgtgaacagtgctttcactgttcgtaaaatctccaacggtgttggcgtagagcgtactttccagacctacagcccgcaaatcgacagcatggccgtcaagcgtcgcggtgacgtacgtaaagccaagctgtactacctgcgtgacctgtccggtaaagcagctcgcatcaaggaaaaactggcttaagcccagcttcccgatgcagaaaaaagcagcctacgggctgcttttttgtgcctgaaatttgtctatttccggttgccgttggtgatcgtgcctaccggtcgtatcgactcaacggatccagaaccgagttgcggccatcgcaggcaagccagctcccacagttgaaatgcattttcctgtgggagctggcttgcctgcgataggatctacccaacactaaagaaatcagcctgagcccccatgcccgccattgaccaccctctgatcgaccgcttcctcgacgccctttggctggaaaaaggcctgtcagataacacccgccaggcctatcgcagtgacttggccctgtttaacggctggctacaggaaaaaaacatcgaattggccaacgctggccgcgagctgattctggaccatttggcctggcgcctggagcagaactacaaacctcgctccaccgctcgttttctctcgggcgcgcgtggtttttatcgctacctgctgcgggaaaaagtcatcgccatcgacccaacgttgcaagtcgatatgccgcaacttggcaggccgttgcctaaatccctgtcggaagctgatgtagacgcgttgctcgccgcgccggacttgagcgaagccatcggccagcgtgaccgcgccatgctggaggtgctctacgcctgcggcctgcgggtgactgaactcataagcctgacgctcgagcaggtcaacttgcgtcagggcgtactgcgtgtgatgggcaaaggcagcaaggagcggctggtgccgatgggtgaggaggcgattgtgtgggtggagcgctatatgcgtgatgctcgcagcgagttactgggtgggcgacccagtgacgtgctgttcccaagcttgcgcggtgagcagatgacccggcagaccttctggcaccgtatcaagcatcaggccaaggtcgccgggattggcaagagcctttcaccgcacactttgcgccatgcgtttgccacccatttgctcaaccacggtgcggatttgcgcgtcgtgcaaatgctgctcgggcacagcgatttatccacaacccagatctatacccacgtggcgcgtgcgcgcttgcaggatatgcacgccaagcaccacccgcgaggctgaaaacggcctgtaaaaggccaatttatcccgctgcgggctgcccttgcgcccaactgtggtaggctttgccggttagcaaaggggacggccaaccttgcgtttacaaccccgcgtttccaagcggtgtgccttcccgtccctgcatctgccttcaggagttcccatgcgcttgacccagattattgccgccgcagccattgcgttggtttccacccttgccttcgccgatgacgccgccgagcagaccatccgcaagagcctggccgccctgcaactcgacaccccgatcgaaagcgtcagcgcaagcccgatggccggcctgtatgaagtcaagctcaagggcagccgcgtgctgtacgccagcgccgacggccagtacatcgttcagggttacctgttccagttgaaagacggcaagccggtcaacctcaccgagaaggccgagcgcctgggcgtgtccaagctgatcaacggtattccggtggcagaaaccgtggtttacccagccatcggcgagaccaagacccacatcaccgtgttcaccgataccacctgcccgtactgccacaagctgcacgccgaggtgccggcgctgaacaagctgggtgtggaagtgcgctatgtagccttcccgcgccagggcctgggttcgccgggtgacgagcaactccaagccgtatggtgctcggccgataaaaaagccgccatggacaagatggtcgatggcaaggaaatcaaggcggccaaatgtgccaacccggtttccaaacagttcgccctgggccagtccatcggcgtgaacggtacaccggccatcgttttggctgacggccaggtgattccgggctaccagccggcaccacaagttgccaaactggcgctgagtgccaaataaaccagcatcgtcgaacctttgacgatcatggcccgttgatcagtcagcgggtcattaattgaaagccgcagttgtgcggctgttttccacggccgacctagcgtcggccgtttcatggggagttcttcagtgaaaccggtcaaagtaggcatctgtgggttagggaccgtcggtggcggcacctttaacgtacttcagcgtaatgctgaagaaatttcccgccgcgcaggccgcgggattgaagtggcgcaaattgccacgcgttcgccaaagcctcagttccaaacgaccggtattgcgattaccaacgatgtcttcgccgttgccaccaaccctgagatcgatatcgtcatcgagctggtcggcggctacaccgtggcccgtgagctggtactcaaggccatcgagaacggcaagcacgtggtcaccgccaacaaggcgctgatcgccgtgcacggcaacgagatcttcgccaaggcccgtgagaagggcgtgatcgttgcgttcgaagccgctgtggccggcggcatcccggtgatcaaggcgatccgtgaaggcctgtccgccaaccgtatcaactgggtggccggcatcatcaacggtaccggtaacttcatccttaccgaaatgcgcgagaagggtcgcaccttcgaagacgtgctggccgaagcccaggccctgggttacgccgaagccgacccgacgttcgacgtggaaggcatcgacgcggcgcacaaactgaccattctggcgtccattgcctttggtatcccgctgcagttcgacaaggcctacaccgaaggcatcacgaagctgaccactgccgacgtgaactacgccgaagccttgggctaccgcatcaagcacctgggcgtggcgcgcagcactccggccggtatcgagctgcgtgtgcacccgacgctgatcccggccgaccgcctgatcgcgaacgtcaatggcgtgatgaacgccgtgatggtcaacggtgatgcggccggttccaccctgttctacggcgccggcgccggcatggagccgaccgcgtcgtcggtgattgccgacctggtggacgtggttcgcgccatgaccagcgacccggaaaaccgcgtgccgcacctggctttccagccggattcgctgtcggcccacccgatcctgccgatcgaagcctgcgaaagcgcctactacctgcgcattcaggctcaggaccacccgggcgtgctggcgcaggttgccagcatcctgtcggagcgcggcatcaacatcgagtcgatcatgcagaaggaagtcgaggagcaaaacggccaggtgccgatgatcctgctgacccaccgcgtgctcgagcagcatatcaacgacgccatcgccgccctggaagccctgcaaggcgtggtcggcccggtggtgcgaattcgcgtcgaacacctgaactaaccgattgttccagaggccccgtgcaatcggcggcctctgttcgagaatgttttagaggagccagtcatgcgttacatcagcacccgcggccaggcaccggccctgaatttcgaagacgttctgctggcaggccttgccactgacggcggcctgtacgtgccggaaaacctgccacgttttacccaggaagaaatcgcttcctgggccggcctgccgtatcacgaactggccttccgcgtaatgcgcccgttcgtcaccggcagcattccggacgcagatttcaagaaaatcctggaagagacgtacggcgtgttttctcacaacgccatcgcaccgttgcgccagctcaatggcaacgagtgggtactggaactgttccacggcccgaccctggcgttcaaggacttcgccctgcaattgttgggtcgactgcttgattacgtgctgcaaaagcgtggcgagcgcgtggtgatcatcggcgccacctcgggtgacaccggttcggcggccatcgaaggctgcaagcactgcgaaaacgtcgacatctttatcctgcacccgcacaagcgtgtgtcggaagtccagcgtcgccagatgaccaccatttttggtgagaacatccacaacatcgccatcgaaggcaacttcgatgactgccaggaaatggtcaagaacagctttgctgaccagagcttcctcaagggcacgcgcctggtggcggtgaactcgatcaactgggcgcggatcatggcccagatcgtctactacttccacgcttccctgcagttgggcggcccggcgcgttcggtgtcgttctcggtgccgaccggcaactttggtgacatcttcgccggttacctggcacgcaacatgggcttgccgatcaaccagttgatcgtcgccaccaaccgcaacgacatcctgcaccgcttcatgagcggcaacaggtacgtcaaggaaaccctgcacgccacgctgtcgccgtcgatggacatcatggtctcgtcgaacttcgaacgcctgctgttcgacatgcacggtcgcaacggtgccgccattgccggcttgatggacaccttcaagagcggtggcggtttcagcgtggatgaagagcgctggaccgaaacccgcaagctgttcgattccctggccgtggacgacgcgcagacctgcgaaaccatcgccgaagtctatgcccagaccggcgagttgctggacccgcacaccgcgatcggtgtgaaggccgcccgcgaatgccgtcgcagcctggacactccgatggtgatactcggcaccgcccacccggtcaaattcccggaagcggtggagaaggcgggcgttggcaaggcgctggagctgccggtacatttgactgacctgttcgagcgcgaagagcgttgcacggtgttggccaatgacctgaaagctgtgcaggcgtttgtgagccagcatggcaaccggggcaagccgttgtaaggctggctgcgcacacagaaacgccgctttcccttccttgggtcagcggcgttttttgtttctggcaggcccggtttgcgtgatcgtttaggtgagtatcttcagcgcgatagccagtacgctgctgaaaaccgtaaacatggccataacgacgcccatcggataccagaagttctcgcgggttatcttgtgagcttcggcggtgagtttgcggtgctcggcatagatgcgtgatatgtcggcgtgaattttctctaacgcagcctgctctttatcgtgctccagcatcgtattcaaccttcgtaatatgggccatttgacatgcgctgtacgctgcgtagcagtttgaccagcgcccaccgagtataggattcaccttcagcctcagcccccggccaaccccaaaacagccgcccattgcgtaagcagttacgtgcgccgttttttggttgtcatgttgcaagcgcatgctggaatccgtcaccccctgacggccccataaagacgataaagcgaactttcctacgtcagaaccagtcacttaggatagatgcagctcccgttgaaacgattgttcccgaactattgagtggtgatcgagatggaaagtatcagcctattgctcgaagaagcactgagcccttatcaggttacgctgaccacctccggtgtgcagggcgagtgcctggtgaccgttaaaaaccccgctggcgctatcgtcgtcgagcgtgaagtcgaccgcgcgcaactgacggataagcgtgcattggtggatgtggttgattgcctgctgcgcgatctgaaaatcgccgaagggcgccttgaaccctccgttatcgccgcgttgcgtaatgccgctcaaacccgtggtgcagcccgagcatgaagaaatgtttatttgaggaaacttcctacagcatggccggtcagattttttaacagcaagagcaaacattgtgctccggtgtttgtggcttgttgtactggtctttgtaggccacgtttaaccccgaagtgtctccccactcttcggggtttctttttgcccgggatttgtcagtgttccggggactcctggaaaaaactcgggttgtcgcgcaaatagcgctcccgcatctgcgggtccagccatgccgcgtaggcttgctgcagctgttcctgcgggatgtcgcgtaatacctgattgatgcgctgcatggcctggcgcccttcgggcacgtctgagcagccgatatgtatgtgctgataaggcgctgcccccttgatcggatagaacgtcagttcctgtgccgcgatgccctgttgcatcgcgtgatagcggatctccggcgggtaacccaacaccgcctccagccgcccgagacgctgcatctgcaacaggctgccgagggcgtcattgccataatgcagtgccagtgagtggggcgtggcgcgctttatctgcgcatcgatcacggggccataactgcgttcggcggttgcgccaatacgcggtttatgggcatcgagaaaggcgtgcaggtcgaactggccctcgacaataaacggtgccatggcggcctgctggctgcgcctgatggtcacgccattgctgaccactacaaaggcctgtgtggaaaacacagtgtactgggcgcgttctgcggtccacagcagcgatgggtcgcaggtcagggtggggccgcgcaacatctggatgccacgggcacgattgacgcgcatcacctggtggtggtactccggcaaatgctcgctgagtagcggcaatagttgatcgagcacccccaagcctttttcggggccatcgaaaatggtcacgggcggcaagtcgcgtactaaccaggtcaacgtctgctcggcgtacgccgatagcggccagcccgccgtcatgacaccggccaggcacagctgaagcagccagcgcggggcacggcgaaccatcaaatagcgccatcctcgcgcagtcgggtgatggttgccgcgtcgtaacccaattcgctgagcaccacgctgttgtgttcgcccagttgcggcccgacccattcacagctgccgggcgtgtcggaaagcttgggtacaatccccggcatcttgaaatccttgccgcctggcagttttgccttgaggaacatctcccgcgccagaaactgcgggtcgcccagcatgtcttcggcgctgtagatgcggctggcaggcacctcggccttgttcagtacctcgatgacctgatcgagcggcagcgaattgacccagcgatcaatgacgccgtacagctcatcacggcgaccatcgcggccatcgttgctggagagtagagggtcgtgggccagatcctcgcgcccgatggccgacatgaaccgtttgaagatcgcatcaccattcgcgccgatctgcacgtgcttgccatcggcactggtatggattgaagacggcgtgatgcccggcatgatgttgccggtgcgctcgcgaataaagccgaacacatcgaattccgggatcatgctttccatcatggcgaagatggcttcatacagcgccacgtccaccacctggcccagcccaccgttgacttcgcgatgacgcaatgccatcagcgcgccgatcactgcccacaaggcagcaatcgagtcaccgatggaaattccggtgcgcaccggcgggcggtcctcgaaaccggtgatatagcgcaagccgcccatggattcgcccacggcgccaaaccctggctggtccttcatcggcccggtctggccaaagcccgaaaggcgcaccatcaccagcttggggtttagcgcgtgcagggtttcccagcccaggccgagtttttccagcacgccggggcgaaagttttcgatcaggatgtcggcgtccgccagcaattgcttgaggatcgccaggccatcggggtgcttgaggttcagggtcagcgactttttgttgcgcgcctgcacgaaccaccacagcgaggtgccttcatacaacttgcgccatttgcgcaacgggtcgccgccgtccggggattcgaccttgaccacttcggcaccgaactcggcgcagatacgtgaggcaaacgggccggcgatcagggtgcccagttcgatgactttcaggccggcaagcggtttggcattaaacgacatgaggatccttggcaagcaggggcagtggtgtgatgccttttaacataggcgggcagcgcagggataaggatgatgcagcgcagtagtcgttgaatggcctcgccatcggttagactggccgccttttcctgtctctagaagcccgttcatggcccagccgtccacgacctacaaattcgaactcaacctcaccgaccttgatcgctcggtgtacgagagcgtcaagcagaccatcgcccgccatccctcggaaactgaagagcgcatgactgtgcgcctgttggcctacgccctgttttacaacgagcaactggcattcggtcgtggtctgtcagatgtagacgaaccagccctgtgggaaaaaagcctggatgaccgggttttgcactggatcgaagttggccagcctgatgccgagcgtctgacctggtgctcgcgccgtactgagcgtaccagcctgttggcttacggcagcctgcgtgtgtgggaaggcaaggtcgtgccggtggcaaacaacctgaaaaacgtccatatcgctgcggtgccgcaagaagtcctggagacgttggccaaggacatgccccgcgtgatcaagtgggatgtgatgatcagcgagggcacgatgttcgtgactgacgatcgcggccagcatgaagtgcaactgcaatggctggctggtgaacgcggctaaccctgcctgagcaggtttatgtgggagcaggcaagccagctcccaccgttgatctgtgttttattcagcattgctgtttaaccgttctatcagaagagaagcttccgtcaccccatgcgtatcgatccccgcccgttgcccgctgtcctgccatttctcggtgaattgccaccgctgttgacccgtctctacgccgcacgcggggtgcagtctgaagccgagctggacaagagcctggcgcggttgattccttatcagcagctcaagggcatcgacgcggcagtggatttgctggtgacggccctggaacagcgccagcgcatcctgatcgttggtgacttcgacgctgatggcgccaccgccagtaccgtgggcaccctgggcctgcgtttgctcggtgcggcccacgtcgattacctggtgccgaaccgcttcgaatacggttacggcctgactccggaaatcgttgcggtggccctgcaacgcgagccgcagttgctgatcaccgtggacaacggcatctccagcgtcgaaggtgtggcggcggcaaaagcggcggggttgcaagtattggtcaccgaccaccacttgccgggcgacgagttgccggccgcagacgccatcgtcaacccgaaccaacccggttgtgagttcccgagcaaagccctggcgggtgtcggcgtgatcttttacgtgctgatggccctgcgtgcgcgtttgcgcagcctcggctggtacgacaatagcccacagccaaacatcggcgagttgcttgacctggtcgcgctgggcagtgtcgctgacgtggtgccgctggacgccaacaaccgcatcctcgtgcatcaaggcctggagcgcatacgcgccgggcgtgcacgcccggggatcaaggcgattctcgaggtggccaagcgagacgcttcgcgcattacttccaccgaccttggttttatcctcgggcccaggctcaacgccgccgggcgcctggatgacatgagcctgggcattgagtgcctgctcacctcggactttgccgctgcacgggaaatggctgcgcaactggacggcatgaaccaggaccgcaaatccatcgagcagggcatgcagcgtgaggcgctcgcccagctcaaggacttgccggtggagtcgatgccgtacggtctgtgcctgttcgacccggaatggcaccaaggcgtgatcgggattctggcgtcgcgcatgaaagagcgttacttccgcccgaccatcgccttcgctgacgccggtgacggcctgctcaagggctcagggcgctctgtgcagggttttcacatccgtgatgctctggccgtggtggcgagtcaacatcccaccctgatcgccaaatacggcggccatgcgatggcggcgggtctgacattgcctgaggaaaacttcccgctgtttgccgaagcctttgatgccgaggtgcgtcggcaactgtgcgaagaagaccttacggggcggctgctgaccgacggcacgctggcggtggaagagtttcacctggaactggcgcgcgccttgcggcatgccgggccatgggggcaacactttcccgagccgttgttccacggtgtgtttcagttggtggaacagcgcgtggtgggcgagcggcacctgaaggtggtgctcaagagcgagtgcgggtctgtgaagctcgacggtattgcgtttggtgtggaccgagaggtgtggccgaacccgacggtgaagtgggtggagctggcctacaagctggacgtgaacgagtttcgtggcaatgaaaccgtgcagttgatgattgcgcacatcgaaccgcgctagttcttgttggcaccgcaaaaaacaaatgtgggagctggcttgcctgcgatgctggcaccccggtttttcagttaaacccaggtgatgctatcgcaggcaagccagctcccacacaagcctgcacaggcgggggaattattccgttttgtccttggcctggtgcttcacgatgatgtccaccaagcgctgtgccagcgccgggtagttctcgtcaaagtgatgcccgccaggcagcttcaccgcttcgccgacggccgtcttgtcggtgcagccgctctcgtcgacttcttcggcgccataaatgcacaccactttgtcagccggcagcttggccatttccgggccggtggcagcttctttgccggcattgcccagccagccttccacttcgatctcaaagctgccggtacgggcgaaggccagcaggatgattgcgtccacacgctgctgttcgttttccggcaggcggttgtagatggcgggcagtacgtcggcgccgaacgaatagccggtcagcacgaagcgtttggtgccccatttctgccggtagtgctgcatcagttcggtgaggtccttggcgctttgttccggggtcttgtgctgccagtagtagcgcagggtgtcgatgccgaccaccgggtaaccgatcttggccatttcaccggccacatcgcggtccaggtcacgccagccgccatcaccggagaggaacagggtgacggtgtctttggcttgcccggccggtacttcaaccactggaatagccaggccgccgttgtccgagccgacgagttgcttgcgcagttcgttgttcagcacttgcgggtagtggatgtcgtagtcgctgatgctggtggttgcacgcggggtatcgcgtacgaaactggcagcatcatcatcagggttatcgttccatgccaccagccagttaccgtgcgcggctgttttcggcagtgggtccttgcagccttcctgcgtcatggcgaaaccgacggagatggcgttggccttgtcgtcgttctgtgccgccaaccagcgccaggccaggcttgcacccgggccgatgccgctgaccagggtcgccgggcctttaagctgcgccagagcgccttgcagcgcttgttcctgcaatttgcagtcatcctttggcaggatgacttgaacgatttgcgccgagccaccctggctcagggcaatcagttggctatcggtcagggtttcatcggccatcacggctaccgccacacgggcttttgccgagccgttaggcgttacacgggtcatcaccgagccgtcggcctggggcaattgctccagggtcggctgcggggcagggcggttccagtaccaaaagccaccacccgcgatcagcgcgagcagcactacaagggccaatacataccgccaggagcgtcgaatcatcagcgtttcaccaatccagtcaagccgcctgcgatcagggcggcagtgtcggccagtgccaccagcggatcaagtcctgcgggcacggccatataacggggttcccagtcaggctggaacttgtctttgaagcggcgcaaaccttggaagttatacaactgctcgccacggcggaacaccatcgagcccaagcgttgggtcagcggcgcaccacggcgtggctgcaggcccgacaacggcaccatgccgaggctgaagcgggcgtaatcatggttcttataatgttgaatcaggccaaccatcatgaattccatggtcagctttggcgcgtccgggtgggcgcgcatcaggtcgagactggccaggtcgtggttgtaggtctcgagcaggttggcgaaggccaccgggcgcccttcgaagcgaatgatcgcgatgcgaaagtgcttgaggtagtcgtcgctgaaacgtcccagggaaaagcccttttcgcgcacgtttttgccggtcagccaggcgtcggagatgactttgagctcatccatcggcgcatggcccggttcgaagatttccagggacaggccatcccgggtgccacggttccaggtgtagcgcagatccttcatctctttgcccttggcctccaggtcaaagcgtttgaggtccacgcgggcttcttcgcccagtttgattgcggtcaggccgatgtccatgtagtacggcaggttctcggcgcggacctggtagaacaccgggcgggcgtgatggatatcgcacaggtcacggaactgccagatcatctcggcgcgcggctgggtcgggccgatggggtcatacaaggccaccaggctgcgccctcggcgggcgtacatcaggaaggcttcatcgttgggatggaacagcagcgccttgtcaccggtcagcgccaggccgccgtcgggttgggaggaggccatcaggatcttggtggcgcgctccagttcatccggggtcggcaggtggatgatcgggcgcgcggtacgcagcagccaggtcagcgagacgatcaccagcaacactgcggcgccgagcaatgagcgcaggccacgcggggcgttggcgtcgagggtgaactgccaccacagttgatggctgtacggcacgtcttgataggcaaacagcagcagccagatcgaggcacccagcacgcacacgctggcaaccagatacagcggcgagaacggcagttcggtcagacggctggcgcggtagaacgagcgacggaagatcgccagcagcactgccgtcatgatcatcaggctggcttcttcccagtcgaaacctttgagcagcgagagcagggcgcccgtcaacagcagcaccatcgtcagcatccaggcggccgacaaacgccggcgcaagccctgggcgagcaacaggcacagcacgccgatcaggctggcaccgaagtgcgaggcgtcaatcaggcggtggggaatcaggaagccgatgttttccaggcgtgaatcgatctctggcgtagcgccggagaacagcaggaccacgccggacaaaaaaaccagcacggccagcaccggtgccgccaggcctgaagccacccgcaggctctgctgggtctggaacaggcgctgggcttcgttgaccagcaggaagatgcaggcgatcagcagcggcagcaccacgtagatcatccggtacagcagcagggcggcagccagtggcgcggcgccgagtttatcggcgaaggcggcgagcaggatcgcttcgaacacacccacgccacccggtacatggctgagtacgccagcggccagggccagcaggtacaccagcaggaacgggccgaacggtggcgcttccggcagcagcatataaaggacggtggcggcagcggccacatccagagcggtgatgatcaattgcaggaaggtcaggcggcgacccggcaggcgcaacgtacggcgtccggccttgaccagcaggttgtccgggtagggctggtccggcaggcgacgacgatagatgccaatgcacagcgcggcggacaacagcagcacggcgccggcgatgccgccgagcagtccttgagacaagtgcaggtacgtagaggccgctggcaaattgctcagcgtggccagtgcggcgagcgggggcagggcagtgcccagtgccaggctggcgaacacggtcatgtgcgccacttccgccgcgccgatgccgtggcgcgcatagaggcggtagcgcaccgagccccccgaaagcatcgacaagccaatggcgttgccgatggcgaaggccgtgaagccgcccatggccagggtcttggccggcagctttaccccggcatagcgcgcgccggaaaattcatagcccaacagaatgatgaaaccggcgacggcggcggcaaatgcgccgagcagcgcgggcttgggcacttccaggatcgagtcgtggagcgcatagaggtccagctccagcagcaggtgtcggcaggcgatcagggcgattgcgaacagcaacagggtaacggccagcccgatcggctgacggtatttgctcaacagatccagccagcgcaaacgggtgggagcgatcggttgttctgctgtgacagtgtcttgtggttcagacgagttggcgcgcatcaatcacctcgtggattgtgcgcgacaggatggaggtatccagccaagttaccaatccctatggacaaaataattacaaatattaacgcgtatcgccgggggcggcgacagcggccattggtcgtagagggtagcgcttgagcattgagcatagcttgcaatgagatggactctacaaaccgcatacggtttcatgaaagatgccatgccattgtttcagaagaactttttcaccggatacaaaaaaggccactctttcgagtagccttttttgatgtttggttgcgggagccggatttgaaccgacgaccttcgggttatgagcccgacgagctaccagactgctccatcccgcgtctgtgggcggcattctacagtccagcggcgaggtgtcaaccgttaatgggctgatgggtcaaataagtgtgaaatagtcactttgcgtcgcgcatgtgcggtaagtgccgacgggcaaagatttttttgtcttacaattttcatacagggggtaaaacaggcaggcacaaaaaaggccactctttcgagtagccttttttgatgtttggttgcgggagccggatttgaaccgacgaccttcgggttatgagcccgacgagctaccagactgctccatcccgcgtctgtgtgtcggcattctacagaggaacgccggtgtgtcaacctgtgaatcgaagaaaagcgcttgtggttcaattggttagctctccagggtcagctggaaaacggcgccgggccagtcaggccgagggtttcagctctatcgggatgctcatttcgattgagaaaataaattcatccgtgaatcttcctaccgtttgcgcggaagattcaaactactggtgctatatacaggggtgagtgcgatactggccacccgttggtttacacccccgtttatatgacacaacgcaaaatcatccacgtcgactgtgattgcttctacgccgccatcgagatgcgtgatgacccgagcctggcgcaaaagcccttggcggtggggggctcggcggaccggcgtggggtcatcgccacctgcaactacgaggcgcgggcctatggtgtgcgttcggccatgtcttcgcgccatgccttgaagctgtgcccggacctgaccatcgtcaagccgcgtatggacgcctataaagaagcctccaaggaaatccagacgatctttcgcgactacaccgacctgatcgaaccgctttcattggacgaggcttatctggatgtctctgacagcgagcattttggtggcagtgccacgcgtatcgctcaggatattcgccgccgcgtctctaaccagttgcatatcaccgtgtctgccggcgtggcgccgaacaagtttctggccaagatcgccagcgactggaagaagcccaatggcctgtttgtgataacgccggatcaggtcgaggattttgtatcgcaattgcgcgtgagcaagttgcacggtgtgggcaaggtcaccgcagacaagctcgcgcgcctgggaatcgaagactgcctgcaactgcgcgagtggaataaattggcgctggtgcgcgaattcggcagttttggtgagcggctgtggagcctcgcccgtgggattgatgaccgcgcggtgcaaaacgacagccgtcgacaatcgatcagtgtggaaaatacctacgacgttgacctgccggacctttcaagctgcctggcgaaactgcccgagctgatggaaaccctggctgggcgcatggcgcgcatcgacagcagttaccgtgcgggcaagccattcgttaaggtgaagtttcatgactttacccaaacgacactggagcaggccggggcggggcgggatctggagagttatcagcagttgttgacgcaggcgtttaaccggggcgggaagccggtgcggttgttggggatcggggtgcggttgctggacctcagcagcggcaacgaacaactccaatttccctggtaaaaccggatctaaaactgtgggagctggcttgcctgcgatggcggtgtatcagtcaacacatcagtgactgacattcagctatcgcaggcaagccagctcccacatttggatcttcatcaagcacagatatcagcgcgcgccaggatctgccaccaaccgccccgcatccttggtcagtgcttgcaggaattcctgctgcaactccggatcattgcgggtcagctcgatcaaactttgctcaagctcgctggcttcttcttccaggcccagctccgacaggcgtttgacccggtgcacccactggttcacctcgtcgtcttccagatcgtcgtagatcaggccgtgagcctccagcaacttgctgcgcagggtgttgctgatcgccagggtcgagtcagagtgcacatcgtcctggccatcttccacgctgatcttcaaggtggtgacgcggttcaggtcctgctcggcaaacgggctgtccaacaggttcaggcgcagcacgccctcgcggtcggtggtcaggtcaaaggtctgcttgccggcggtgacttgtaccgggcgttcgctccagggcaggctggaatactccgtgcgcttgtcgcgctggacttcatcgatacccgccaggttctgttgcgcacggccgtgggattgcacgttcatgaacgggttgatgccgtccacgccgtagctcagccagtcgcgagtcatgctggtgggcaggttgccgagggcgaagatgttcgccacgttggcccccgcaccggccaccagggcgaccgcgcccaatggcatctcatagagtttgcgccagggttggtagggggtgtaacgatcgtaacggcgggtgacttcgaattcggtgacctcaaaggtcttttgctcatgaatgcgaacccggcgttgcggcaactccagcactttggggtcgcctacatcgatctgcaggctatggtcgagcaacttacgctcgacccgctcctcgtgctcactgcgttgcgacatctggttggcgcagccgctgaccagcagggcgccgcacaaggcggcgccccccagggctctggtgtttcgcttgaacatgacttctcttgatctggtttttcagcgacgaatacgcgcctgaaggaaagacagcacgtcagccaccggcaacggttgggcttcggcttcggtccggctcttgtattccagattgccatccgccaggccgcggtcactgaccacgatccggtgcgggatgccaatcagttccatgtcggcgaacttgatgcccgggctggttttcttgtcccggtcatcgagcaacacttcaaaaccggcagccgtcagttcggcatacagtttgtcggtggcttcgcgtacttgctcgttgtcgtagcgcagcggtaccagggcaatctggaacggcgccagggcgtcgctccagatgatgcctttctcgtcgttgttctgctcgatggcagcggcaaccacacgcgatacgccaataccgtagcaacccatgtccagggtgatcggcttgccgttctcgcccagcacttcgcacttcatcgccttgctgtacttgttgcccagctggaagatgtgcccgacttcaatgccgcgcttgatttccagggtgcccttgccatccgggcttgggtcgccggccacaacattgcgcaggtcggccacggtcggaaccggcaggtcacgctcccagttcacgccgaagtagtgcttgtcgtcgatgttcgcgccgataccgaagtcgctcatcaactcgaccgagcggtcgatgatgatcggcagcggcaggttcagcgggcccagggaaccggcgccggcgccaatggcgtcgcgcagttcggagtcggtggccatgaccagcgggctggccacgcctggctgctgggcagccttgatttcgttgagctcgtggtcgccgcggatcaccaaggcgatcagcttgccttcttcttcggcgcgcacgatcagggtcttgatggtcttttcaatcggcagattgaatttttccaccagggccgcgatggttttggtgtctggggtatcgaccaggcgcagctcttcagccggtacggcgcgggacgtttcccgtggcacggcttcggctttctcgatgttcgccgcgtagtcggaaccgttgctgaacacgatatcgtcttcaccggactcggccagcacgtggaattcgtgggagccggcaccgccgatggagccgttgtccgcttcaaccgggcggaatttcaggcccaggcgcgtgaacacgttgcagtaggcctggtgcatgcggtcataggtgacctgcaaggacgcctggtcggcgtggaacgagtaagcgtccttcatgatgaattcacggccgcgcatcaaaccgaagcgtgggcggatttcgtcacggaatttggtctggatctgatacaggttcagtggcagctgtttatagctgctcagctcgttacgcatcaggtcggtgatcacttcttcgtgggtcgggccggcgcagaaatcgcggccatgacggtccttgaagcgcagcaactcagggccgtactcttcccagcgcccggattcctgccacagctcagccggttgggtgctcggcatcaacacttccagagagccggcggcgttcatttcttcacgaacgatggcttcgaccttgcgcatcaccttcaagcccatgggcagccaggtgtacaggccagaggccagtttgcggatcatgccggcgcgcagcatcagctgatggctgatcacaaccgcgtcggaaggcgtttctttctgtgtggcgagcaaatattgactggtacgcatggtaggccgttgtcggttgcttggacttgaaatgactctggattgtacgggcggttgccgctggagtacaggcgtgaggttgtggggtgtttttgttggcgcagggcttttgtgggagctggattgcctgcgaagggatcaccgcggtgtatcagatacaccccgtcgtctgtatcgcaggcatgccagctcccacattgatcgagtcgtgtcagtcttcttgtggaggattcaaccgaatccgccgactctcctgaaaccaatgcaacgcaatcaaaagcagcgtcggcacacccagcacacaggtgatcaggaagaaattgtgataaccgaacttctccaccatcacccccgaatagccgccgatcaggcgtggcagcaacagcatgatcgagctgagcagcgcgtattgggtggcggagaacttgaggttggtcaggctcgacaggtaggcgacgaacgccgaggtggccaggcctgagctgaagttgtccagggaaatggtgaagatcagcatctgcaggtcggggcccatatcggcgagcatcacgaacaacaggttggtggcggccgaggccacgccgccgataaacaggatcggcagaatgccgaaacgcacgatcaacaggccgcccatgccggcaccgagcagggtcatgatcaggccgaagatcttgctgaccccggcaatctggtccttggtaaagccctggtcgatgtagaacacgttggccatcacgcccatcaccgtgtcggacatccgataggtggcaatcagcccaagcagcaacaaagcctgccagcggtagcgcaggataaagtcgttgaccggtgtcagcaccggcgcaaggccgcgtcggcccatggtcgacaggcacagcgtggtcaggatgatatagaggatggcgcgcaggaatgcgcgatcttccatcagcagttcccacaggctgacgccgtggaacagcacgctggcgaaatcagtgttgtacaactgggtgaacatcgccggtaccgacaccagcaacacgatcagcacaaagaccgagacaagctgatgcacaaagctgtagcgcccggcctgcaactgggtgcgcaatggcacattgggttcgcgcatgaacagggtggtcagcagcgccggaatcatcagcaggccgaacagcacataagtgcctgtccacgccgaatgcttatagttgaaaccggttgagccgaagccttcggcaaagaacagcgcgccggcggtcgcgagcagggcagcgatgcgataaccggacatatagctggcggcgagggcagcctggcggctgtcgtcggcgatttccagacgataggcgtccacggcgatgtcttgggtggcggaagcgaaagcgacgattacggcaatggcgatcaaccaggacaggtgcttttgcgggtcgcagaagcccatgccgatcaacccgaggatcaccagcgtctgggcaagcaccagccaggagcgacgacgccccagtttgccgagcagcggcaggcgccattggtcgagcagcggtgaccagacccatttaaaggcataggccaggccgatcaggctcgcatagccaatggtctcacgggccacaccggcctcgcgcaaccatacggaaagcgtcgagaacaccaacatgtaaggcaagccggcggcgaaaccgagcaacaacaagactaacgtcgaagggctggcataggcggcgagcgcggcgcgccaggttttacggggcatgggctggagtctgcctcagatttgcggaaacaaagcgcgcactctaaccgctgtgctctaccgggcgccagccatggcgctgaatatcaacgcgattgttcaggatactgacaccttcactgcgtaaacgcgcacgttgttcgtccccggaagcactgcccaccggcagacttatccgaccaccggcggccagtacacggtgccagggcaacttggtgtcttgcggcaactgactcaaggtgcgcccgacccaacgcgccgcgcggcccagcccggccaggtgcgccaactcgccgtaactcaccacgcaaccttcgggcacttgcgcgagggtcaggtacagcgccgttcgacgcatttcggcgggtgtttgcggggtttcggcggctgggttcactgtgggcacatccgttgagatcgtcggcatttttgtaagaaacgtctgtaaatatcgaagagagcagtgaactgaatacaaatacctgagtcagtccttgctaagacgttatctaacacgataatgccgccttttttgtcaaacttgagcctcgaatttgcttatgttgtccagaaccctgctgtgccttgctgttttcagtgcctccacgcctttgctggccgacaccgtctggttgaagaacggcgaccgcctgaccggcaagatcaaggtcttcgacggcggcaagctgttgatccagaccgactatgccggcgccatcccggtggactggaagcaggtcaaaaccctggagagcgaccaggaactgctggtcaagcaagacgcctactccggtgagaaggccaagtccctgaaagcggcggacgacggcaaagtggtgctggccaacggcgaggcgcccaagacggttgagttggcgagcatccagcagatcatgaagcccaagcctgtgatcgaagacctggtatggaaaggtaatgtcgacctggcgctggattacaagcgtgccgataaagacaccaacgactacgacatcgacttcaagaccaccgcccgtcacggccagtggcgccacaccgcgcaaggcgagtacaaccgcgagttccaggacgacgtgaccaccaccgacaactgggcgctggaatatgacctggaccgcttcatcaccgagcactggttctggcagggccgcctgacttacaagcgcgacaaggttgaagacttgtcccgccagcgtactgtcggtaccggcccgggttaccagttctgggatgatgaattgggcgcgttctccctcggttcgctggtcaaccgcaccgattaccagtattccgacgatcgcaaggacaacttctattccctggccatgaagtggaactacaaccgctatctggtgggcaagacggtggagttcttcaccaacggcgaattgggcaaacccctcgacggcccggccgcctactccctggatgcggaaatgggcctgcgttacaaggtcaccgaatgggcttcgctcaacctcaaggccgagcgcgacattatcagtggcgactcggaaagcagcctgagcaagacccgctacacagcgggcttcggcgtggcctggtaacaacctctataacaacgcccggcaaaacctgccgggcggcctctggcaacctgcggggatattgattaccttgtgttgagatccattcccataggggatgggcggccggatacccgaggagtcatacgttgagcgcgcacgttgccaagaacgcccgagagctgttgctcaaggaataccgtggggccctctccacactgtccaaagccatgcccggctttcccttcggctcggtcgtgccgtactgcctcgatgagcagggccgcccggtcatcctgatcagccgtatcgcccaacacacccataacttgcagaaagaccccaagtgctcgctgctggtgggtgagcgcgaggcggatgacgtgcaagcggtagggcgcctgacctacctggccgaagccgaaaaaatcgaggatgaagccgagattgaagcggcggccgagcgttattaccgttacttccccgattcggccaactaccacaaggcccacgatttcgatttctgggtgctcaaccccgtgcgtcaccgttacatcggcggttttggtgcaatccactgggttgaccaactgaccctcgccaacccgttcgcgggcaaggccgagcgcagcatgatcgaacacatgaacagcgatcacacaaaagccatcgcccactacgtcgaactgaccggtttgccgaccaccgagcctgcacaattggccggtatcgacagcgaaggcatgcacctgcgtatcggccaatccttatattggttgccgtttgcacagccttgcaacacgccgacacaagtgcgcgaagccctggtttcattggctcacgctgaggtctggccgaaaaaagagcccgccaacgcttgaattcacgaaatggcgacgtcatctaaggtggactggcaaggcattcttgcgttgaggaaccatttgatgcgcccttttttattgctctttctgctgttcccggtgttggagctgttcgtattcgtacaagtcagcagcgcgatcgggtttttcccggccctgttgctgatcattctcggctcgatgctcggcgttctggtgctgcgcgtcgccggcttggccacggcgctgcgtgcccgtgaaagcctgaatcgcggtgagttgccggcccagaccatgctcgaaggcctgatgatggcgctggccggtggcctgctgattttgccgggtttcatcagtgacgtggtcggcctcgtcatgctgctgccgttcactcgcaagctgctggccggcaaaatgcgccagcgcgctgaagaggctgcgattcgccagcgcgcgttcgccgatgacctgcaacctcgcggcggcccggctccacgccagccgttggggcgtgaaggcgacgtgatcgaaggcgagttcgaacaccgcgacagcaaataaccgctgcacaggcacggcacctttgggtgccgtgttgcgtttaccgcccggcgggcacaaaaaaattccgcccgggccccttgtaataagcttatgcgcccttatgtaacggtcaccgcaaggtttctggtggcaacaccagacagacttcagcgtcttgcctgacgagacgcgaccggcaccgccggaatacaacctgccggtactgatatcggccgatgaacaacacaattaggagagatcgacaatgagcaagcttcgtcctctgcacgaccgcgtcgttatcaagcgcagcgaagaagaaaagaaaaccgctggcggtatcgtgctgccaggttcggctgctgaaaaagccaaccacggtgtgatcgtcgctgcaggcccgggcaagaccctggaaaacggtgaagtacgtgctctggccgttaaagtcggtgacaaggttgtattcggcccttactccggcagcaacactgtgaaaattgacggcgaagacctgctggtcatggctgagaacgagattctcgctgtactggaaggctgattttcccgctcattttcccgttactccaaagtctttaaggattatcgatcatggctgctaaagaagttaaattcggcgattccgcccgcaagaaaatgctcaccggtgtcaacgtcctggctgacgcagtaaaagcgaccctgggcccgaaaggccgcaacgtgatcatcgagaagagcttcggcgctccgaccatcaccaaggacggcgtttccgtcgcgaaagaaatcgaactggaagaccgtttcgaaaacatgggcgcgcagctggtcaaagacgttgcctcccgtgccaacgatgacgcaggcgacggcaccaccaccgctaccgttctggctcaggctatcgtcaacgaaggctacaaggccgtcgctgccggcatgaacccgatggacttgaagcgcggcatcgacaaggcgaccatcgccgttgttgccgaactgaaaaacctgtccaagccatgcgctgacaccaaggctatcgctcaggtaggcaccatctccgccaactccgacagctccatcggcgacatcattgccgaagccatggaaaaagtcggcaaagaaggcgtgatcaccgttgaagaaggcactggcctggaaaacgaactgtcggttgttgaaggcatgcagttcgaccgtggctacctgtccccgtacttcgtcaacaagccggaaaccatggttgccgagctggacagcccgctgatcctgctggtcgacaaaaagatctccaacatccgcgaaatgctgccagtactggaagccgttgccaaagccggccgcccactgctgatcgtttccgaagacgttgaaggcgaagccctggcgacgctggttgtgaacaacatgcgtggcatcgtcaaagtcgcagccgtcaaggctccaggcttcggcgaccgtcgcaaggccatgctgcaggacatcgccgttctgactggcggtaccgttatctccgaagagatcggcctgagcctggaaagcgccaccctggaaaacctgggcagcgccaagcgcgtgaccatctccaaagaaaacaccatcatcgttgacggtgctggcgtagagcaggacatccaggcgcgcatcacccagatccgtgcccaggttgccgagacttcgtccgactacgaccgtgaaaaactgcaagagcgtctggccaagctgtccggcggcgttgcagtgatcaaggttggcgccggttccgaagttgaaatgaaagagaagaaagcccgcgttgaagacgccctgcacgcaacccgtgcagccgttgaagaaggcgtggtacctggcggtggcgttgcgctgatccgtgctctggaagcgctggttaacctcaaaggcgacaacgctgaccagaacgtcggcatcgctgtactgcgtcgcgctgtagaagcaccactgcgccagatcgctgccaactccggcgacgagccaagcgttgtggtcaacgaagtcaagaacggcaaaggtaactacggttacaacgctgcgactggcgtctacggcgacatgatcgaaatgggcatcctggaccctaccaaggtgactcgttcggcattgcaagcagcagcctccatcggcggtctgatcctgaccaccgaagctgcaattgctgatgcaccgaagaaagaaggctcggctggcggcggtatgccagacatgggcggcatgggtggtatgggcggcatgatgtaagccagccttacccggcactgaaaaaccccgcctgcagtgatgcaggcggggtttttttatgggcatttcagcggttcagccgattgagcggcgccgcagcagctttttgaaggtcatgccgcgcgccagggtcaatcgggcagccggcacagatgccatgggttgcggtgcagcagcttggtcgagtgggcgagggacaggcaagtgcgcgagtttttcagagcaggcccgcctgggacgctcccaattgccgaagaccacgatccccaatcgtttcagggtgctggcgtagtagtcctgggcgttgatcttgatgaaatggctgtcaccgcacttggtcggcaggtaaggcgccgcctgactaaaagctgatgcgttgcctgccaacagcgcgctggcagcgatgcacattgaggacatcagccgttgcaagggctttcttgggggacgcatgaggggctctccaacctgaattctggtgcgcaggttaagagagatgcgaatgtctcactgtcacaggctgtaacacaggcctttgtaaggtctgatcactgtggtgagcgggcttgccccgcgttgggctgtgcagcggccctaaaaccatctgtgcaggtttacctgacgatacgcggtgacctttattggggctgctgcgcagcccaacgcggggcaagcccgctcgccacaagtttctcgtttaacaggctgattatcgaggccgtagcggcaggaccaggctcattcgcgcgccgccaagcgggctgcgggtgaccgacagttcgccgccatgccactgggtggcgcgcttggccagtgccaacccgaggccgaagccgccgggctcgtcgccgcccatggccaggcgcacaaagggctcgaaaattttctcgcggttttccgccagcacgccggggccgtcgtcgtccacgtgcaacaccaggtggtgctcgccatggtaagtggcactgacggacacttggtcgcgggcgtaagtgatggcattgctcagcaggttacgcacgatcaggtgcaacagcgcgcggtcgccgatcagttccaggttcgccggctcagtctcaaggctcagccgccgaggatgatcgtccagcaaggcaaactcgtggtgaagccagtcgcgcaggtctatcggttcatgctgcaagtcggtgggcgcgctggccaggcgggcgaaggcaaggctggcgcgtaccagcgcttcgagttcttcgacatcggtttgcaaacgctcttgcaggcggctgcgggtgatcgggtcttcgctttttcccagcagcgtcagggcaaaacgcatccgcgccaggggcgtgcgcagttcgtgggacacggcctgggagacctcgcgatgacggtcgttcatggcgctgatggcttgggcgtgctgctgcaaagtcagcagcaacggcgtccattccttgcccatggcgggcagcatcgcatttggggtacgcgccagtgtcgcgaggcagccattgagggtattcaggtcgagtcggcgacggcggtgcgtgcgtatgccgagcccgatcagcagcagtaccggcaggcctgcgacggcggcggtgagccagtaaaccggaaatttcaacaggtccttcacctcggcggtgccccacatcgggccgaactggatcagggtgttggcgtcaagcgggaagtaggacacgtcctcgtcgctgttcagcgccggttgccgatgttccagcatgaccaaggcttccggcggcaataccacctcatccagcgttaccagatgcaccgggtactggaaatgcgcacgcagggtgcgcatgcgtgcttcacgctggtcggcaggcaaggccttcagctcttcggccaccaggtaaccgggcccggccatcaagcgtaaaaaactgtcctggccgacgaacaccgaggcattggcgcacagccacagcaggtacagggtgaggcccgcccagcccgcggccgcgacggcgaccatccagggccgcaccttagacagcattcggcgcctcctgcgggatttcgacaaacaagtaaccctgggccgtgatggtctgaatggtcaccgggcagtccaggctcatcagttttttgcgcaggcgcgagacgcgcatatccacggaacggttgaggccgtcgtattccaggccgcgcaaactctgcaggagtttttcccgggtcagcagcacgccgcaatggcgggcgaaaatcgcgagcaattcgaattcggcgaccgagaactgcaacggggtttcgtcaagccaggcgaaatggctgttcaggtccagtcgaaacccgccccattggtagtaagcgcgtggggcttgtggatggcgacgcagcaatgagcgaatccgcgccagtaacagcagcgggtcgacgggcttgaccacgtaatcgtccgccccgaggttgaacccggtcagttgctcggcgttttcatccagcgccgtcatcatcagaatcagcccggggtagctgtcacggatttggcgacacagggtgaaaccgtcgatgcccggcagcatgacatccaggatcagcaatgccggtttttcatcgcggatgcgttgggccgcgcggtcgccacggtgctccaccgtgacggtaaaaccttcggcacgcaggaactcggccgtcaacgcggccagtgggcggtcatcttcaatcagcagcagggtatcggacatgcaaggggcgccgtcgccggaggatgggcgcaagtgttacgcccttgcctggggtcaggcaagggctctgctacggcgtcaacgcacgctgataaccggcgccgcttccttgggtggcttccagcccagcaattgctgtttgaaaccgtagctggcggcctggtaataggtgatcgcgcgctggatcaacgggtcgtcactgcccacacgcagctcctggctctcggccaaggcctgatcatgtcggcgcaggccctgacgcgggctgagaatcgccaggtccttgccgtcaaacaaccccaggtgctggtaattacccaccaccacgcgaggtggcagcgggttgtcttgcaacaggttgcggccgaagaaagtcgactcgtagctcaggttgatcaggcccaacaacgtcggcgccaggtcgatctggctggccagttgcgcggtttcacgggcttcgatcagcttcggcgcatagatgaacaacgggatctgatagttggtgatgggcaagtcttccttgcccgcgctgccggcggtgtggtcggcgacgaacacgaagatcgtgttatcgaaccagggtttctggcgcgccgcgtcgaggaactcgccgatggcgtggtcggtgtatttcaccgcgccgtcgcgtccgttgccggatttgatatcgatgcgcccgtccgggtaggtgtaggggcggtggttggaggtggtcatcagttgcagcaggaaaggctgctgcttggcgtagtcggcgtccgccagtttcagggtttggcggtagaggtcttcgtcggccatgccccaggcgtttttgaacgagatttcgctttcaggcacgctgctctggtcgacgacgcgatagccgttgccgctgaaaaacgcgttcatgttgtcgaagtaaccgcgcccgccatacacgaacacgctgtcgtagccgacggccttgagctgctggccgaggctggcgaagccgctttcacggccgatgcgcttgacgatcgagcggccgggcgtgggcggaatggccagggtgatggcttccaggccacggtcggtgcgggtgccggtggcatagaaattattgaagtacaggctttgtttgcgcagtgcgtcaaggttgggcgtgaggtctcgtccgtcgccattgctgcccatgtatttggcgctgaagctttcaatggtcaccagcacgatgttgggtttgcgcggcgtgccggggttgtcgatggcgcggcggatatccagcgggtcctctgcgataaagcgcgcgttgggttcgctgagttcggcgcgcagctgtttggcaaccacctcggcgggcaggctctggtagaactgggtgtagtccagttcgttgttacggaaggctgcaaaaaactgatacgggccattgctcgccagttcatttttgtaagcgttgccgccttgggtgcgcgggctgtcctggctgatcaattgcaagctcaggccggcgacgatcaacaggctcaaggcattcagcaggcgagcgcgcaaggggggcagcggcgcgttcatcgcggtgttgaacggcttgcgcagaaccacactcaatacgatggcgagcatcgccaacaggctgagcagcttgccgatcgggtaggactccagcacgttattcagcacttcatcggagtacaccaggtagtcgacggcgatgaagttgaagcgcacgccgaattcatcccagaacagccattcggcggtcgcggtgaacagcatggcgaacaggctgacggtcagcacggcctgcaacaaccagcgatggccccggcggcgccacaaggcgggcgggcacaacagcaaatacaggcccagaggcagcgctgcataggtcaaaaagccgagatcgtagagcaagcccacgccaaacaccggcagcaggttgccaccgacttcgttcaggtgggtgacgagcagcacgctgcgagtcagcaggaaaataaccagccaggcaccggtcaccaacagcaaatagcgcataggcgccgttttgagaaaccccatgtccatattccttatatcgatgggcggcgattttcgccctgacactgtagtcaggttgtgaagctatagtgaaaatctcgttctaccgaacaattggttgaaaacctttatcagtgggcctttcaggtctatccctgagccacacttggccttaagctgcgcgagccaacacggccgttaccgcgtacggagacactgcccatgcgaattctattggttgaagacaaccgcgatattctggccaacctggccgattacctggggctaaaaggctacaccgtggactgtgcgcaggacggtttgtcaggcctgcacctggccgccaccgagcattacgacttgatcgtgctcgacatcatgctgcccggcattgatggctacaccctgtgcaaacgcctgcgcgaggacgcgcgccgcgacacgccggtgatcatgctcaccgcacgcgaccagttggatgaccggctgcaaggcttcaagtctggcgccgacgattacctgctcaaacccttcgccctgtcggagctggccgcacgcattgaagccgtgctgcgccgcgcccaggggggcgggcgccgcgcgctgcaagtcggcgacctgagctacgaccttgataccctcgaagtcacccgcgaagggcgcctgctcaagctcaacccggtcggcctgaagttgctggcggtattgatgcagaaaagcccccacgtgttgcgccgtgaaattcttgaagaagccctgtggggcgatgactgcccggacagcgacagcctgcgcagccacgtccaccaattgcgccaggtgatcgataagccgttcgccaagccactgctgcaaacggtgcacggcgtgggttatcgcctggccgagggtcgtgatggagtttaagcaaagccttgcccagcggatcatcattgcctttgccttgatgagtgcgctggtggcgggggccttcgccatgggtatcgtcgcgacggtgcaccttgtagaagagaagctgatttcggcgggccttggcggtgacttgcaacgcctgctgctgatggacagcgtcgaagactggaaccaccgccccgagccggatcaactgttctatttcagtggcggccccggggatttcgagctgcccaaggacctgcgtcacctggaaccgggctttcacgaagtatttcgcgaagcgctgtcgtaccacgccatggttgaagtggtggatggccggcgttatgtactgctgcaagatcagagtgatttcgaagagcgtgagcgcgtgctgtttgccgtggtgctggtgggctttgtacttagcctggcgctggcggtgtttctcggttgggtgctggcgcgcaaggtgatggcgccggtggtgcgtctggcccgtcaggtgcgccatcgtgatcagttactgggcctggccccgccgctggccccggattatgcggccgatgaggtgggtgaactggcggtggccttcgacgccacgttgggccgcttgcgtcaggcgttgtctcgtgagcaactgttcaccagcgatgtcagccacgagctgcgcacacccctgatggttttggcgagctcgtgcgagctgctgctggaaaacccggcgatcgatcagcgcgggcgcaaccaggtacagcgcatcgcccgcgcctgcgaggagatgcgcgaactggtgcaaaccttcctgatgctcgcccgcgcaaaacacgatgatgcggccatgtcgccgcaggtcagcctgacccaagtggctgaagacctgctcggaatctggcgcgagcccattgagcataaggggctcgagctgatctatctgccgggcaatcccctggatacacgctacaacaccaccttcctgcacgcggttatgggcaacctgttgcgcaatgcgctgcactacaccgagcagggcttcatccgcctgaccctggagcccagcggttttgtagtggaggactcgggcgtgggtattccggaagacaagcgtgaagcgatgttcgagccgtttgtgcgcggcagcgaaaagcgcggtgatggcctggggctggggttgtcgctggtgcagcgtatctgcgaaagccagggctggagcgtcagtttgagcaccatggagcccaacggctgccgctttcatgtggagttgagccaggtcaaaccctgaccgggtggcctgccgttatcctgccagagatcgccgtcattcggcgaagatggccccatgctatctcttgtatctgtaaagtcttgaaatgtatgagattggacaggacaagtttttcacaacgggttgacttgttgatcacagttcgctgcttaaggttgtaggcatcagctactggagatccgttgatgtctaacccgaccaagctcgaattttctgaaaagtacgacgatcagcacgcgcagaattatttgctcaagcatcaggacaatctggctcgccggttgtcccacaagcgcgacgagcaattggcgcgtggcgcgctggcgatggccggcgagccgggcctggtgctggatctgccttgtggcgccggccgtttctggccgctgctggccgagaaacccaaccgtgtgatcatcggggctgacaattcggcatcgatgctgaaggtggccacggctgcccagcccgcggaagtggttaaacgggtacgtcccttgcagacatcggcctttgatatcgatttgccagacaattcggtcgacagtattttctgcatgcgcctgatgcaccacatcggtgatccggaaaatcggctggcgatactgcgggagtttcagcgtgttacccgcgacagcgtgatcatttcgctgtgggtggatggcaatttcaaggcctggaaacgcaaacgcgccgaagtgaaacgtcgtaaaaaaggtgagcaggaaggttaccaaaaccggtttgtgttaccagctgctactgttgaggcagaattcgagcaggctggttttcgtgttcaggaatccctggacttcataccgctctacgccatgtggcgagtgtatgtattgcgtaagaggtaacaggatggcagttgagtgcgtagttggcagtcatgtagctcccgaagaacgatttgattttttctggcgccttcaaggcgaatgggttgaggagcccaaccgtcgacgtggcggtgagagtggcgtacagcgtgtgaccagccccaacggtcgcttgctctacagcaagcgccagaccggccatatctaccgcagttggcttcacccgttcgggcgcccgaccgtgttgcgcgagcgcgatgccctcaagggcctgcgttcgctggatgtgcgcgtgccggagctggtgttctgcggcgcacgccgcgaccctgagcatcggtggaaggccctgttggtgacggcttcgcttgacggcttcgacgagatcgaaaactggtacgccgcaggcggtcgcgaacagtacggcgagctggtgcatgaacgtgtactcaaggagttggccggcaccctggcgcgcatgcacaaaggccgttggcagcatggttgcttgtacatcaagcacatctttgtacgggtgacgggcgagggcgactcggccaatgtggaagtggcgctgctggattttgagaagtgccgccagcgtctgaccgcttatcgggcggcttcccacgatatgctgcaattgcgccgccattcgtcgtggaacgataccgactggaaaaaactcagctacttttacgagacggcgtttggcagcgctatcaagggtttaaccagatgaagctagaaatagcacgaggtttgttcctggtcggggcgttgggcattgcagccctggccctggctgcgtgggagatgcctcgcacacaagtccttcatacggtgcaaggcggtgggcaatgcccgctgccacgcgtcgccaaggcgagtgtgacggtcaaacccgatcatgaactgttgctgttcatgtttgggatgtctcaaggcatgaggccgcaaagttgaaaagattcaaacccccgggaagggccttgcgatgcgaggcccttttttttgcccggattttgcgtatgcatccgaatcggttaaaggtgggagctggcttgcctgcgatggcatcgccgcagtgcaactgatacaccgaggtgactgcatcgcaggcaagccagctcccacacaagccagctcccacagacaagcagatccgttttaaaccaggtgcaagtggttatcccaaaaccctgccggcaactccagcggcttggccatcaacggcttttggcggcaatcgtagaaccggcagcgcccctggcccgacgtcaccacgaaaccatccgcgaccgcgcccacgccggcgcaatccggtaacgggccatccagacgcagtgcaccgctgtccatgtcccagataaaaaaccggttccctcgtggtgccgtcagcgccaccaggcgtaactcgctgtgcaccgcaacgctggccgtgtaatgccccatcgcctgtaactgttcatccgcgacgggaaacgccacaaatggctgccccggccgtttgatcgcgagcaactcggagcgctcctgggacggccccatgaactgctgcccggtgaggatcgtgccatcgctggcgatccccatatggcgcacgctgttcatctgctggtccagggtttccttgctgatcaagctaccgtcgcggtgcatcagcaccaggctcggctccatggcgttgaggttcatctccacccggctttcagcctcggtgcgaatgccgccgttggccaccaccaacgtttcaccgtcgggcatccacgacacctgatgcgggccgatgccatgggtggaaatctcgccactgtgtacccaccgctcgccttcgagtttatacacaccgagcaaaccacggccggggtcggacgtgtcgttctcggtggtatagagccagtcgccgctcttgtgaatcaccgcgtggccatagaagtggcggttggcgtgggaggtgatggtttgcagcagcgtgccatcacgcaggtcgatcaagtaactctcggtgcccgggcgacgggcgacgaacagcgcaatcggtaacgtcggatggttgatgatgtcgtgacagcgctggccgacctgggtggcaaatacctgtttgccatccaggcgaaagcccacggcgtagtgtttgccatcagcatcatcgcgcgccgacagcagcagcgggcccttgccctctcttttgaacagcgtccagccgcccagcgtgagagcgctgagcagcatgctgccaacggccaaagcctgtcgcctgagcatcatcagtcaccgtcgttggcgttgaagcccagttggatgcccagcgccttggccagctcgccttcgtgcaggcggtggaccacgttgaggctgtcgtagatatcgttgagctgctggcgcccggcgtcgtcggccagcaattcattcagcgtgcgctggttgctggcgaacagtttcagggaggcggcataggcggcgtcgatcttgtcggacagcggcttctgctcggccggcaacaggccacgcaggcctttgttgtcgacgccggcccacacggtctgggcagccgcgaggctggcctccaggctttgcagggacgactggctgcgccacgcatcggcctggaacggctgcgggatgcccttggtctggcggcccatcggcgtgccgagctttttcttcagggtatccagcgcagtgacctgcacccgcagcaaatcagcgatggcttcgtgggaatcggcgtagcgctggttcggaaatttagtcatctgcgcgagcatgccgtcggtgctgttccagctcgccaggatttcttcggccagggctttctggcgttcgccaatcgccaccagcagcgggcaatagcgggctttctgggcttcgtcggcgacgtcggtcttggcgtcgtagaggatgtattcgtaggccgagaggccttgcaccactacgctggacttggccagtgcggcgccgtcgatctgcggctgggcggtgaccagctgttcgacctggcggccgaccaggttcttcttgtccggccagaactgcacctgccacgaacggttgccctcggccagcgggccaatcagcaacggttgcaattcggcccaggctttttgcgcgtggagaaagtcggcacgggcggtgtccaggctttccttgccctggcagtaggccagcgcactgacggccagttggcggtcggcttcaacccagcggctgtaggtcggcaggatcacttgcttggcgatggccgccgaggtcaccgcttgcgggtcctggggcgagcacgcgccaagggcgagggcggccaggctggtgaacaacaacttgggacggaacatgtcgagctcccttctgtaattgtggcaaagcttataaagaattcaggaacgccagcaacgcagcgcgctgctcggcattgaaggacaacacatgttgctgcgccgcttgcgcttcaccgccgtgccacagcacggcttcaagcaggttgcgggcgcggccgtcatgcaaaaactgggtgtgaccactcacggtttgcgtgagcccgatgccccacaacggcggcgtgcgccagtcgcggccaccggccttgaattcgctgcggtggtcggccaggccgtcgcccatgtcatgcaacagcaggtcgctataggggcgaatcacttggttggccagctcaggttcggcagcagtggccgccgtggtgaacgcgggtttgtggcaaccctggcaaccagcttgatagaacaggtttttcccggccagcacctgcggcgtgttgacgccacggcgcgcgggcacggcgaggttgcgggtatagaacagcaccaggcgcaggatgttgtcgctgacttccggctcgccatcggggccgttgccgtttggcgcctgtttgcaggccacttgggcgtcggtgcagtcatcaaagggtctcagggacgtggtgaggcccatatcaccagaaaacgcgtgaacattttgttgattgagattgggttgcccggctttccagccaaaacgcccgaggaccgtcttttgctgggcgtcatcccagacccgattggcacggccgacaagggcttccttgtcggcggttttcgggtcggtgttacgcaggatatcggcatcgctgatggcctcgagcaaacccaggccgatcatcggcggtgcgatgcgcgcggaaaaaagtgtacccggatgcattgggccatagccgagctgggtgatttgcaggtccggcttgcgcaactcgacgaccgtgccgtccttgaaggtcacgttgacgggtgtgtagtcgacccgcactttgccttccggggctacgccggggacggccatgtcttgcaattgcccgccgtagaccggctcgggcaccacgccgacttgctcgatcaaccgggcatccacgggcgtcgccggaatcgacaggcgcaccagcatcgacacggcgttcggcgcctcgggcagcggcgggtggccacggccgtccttgatatggcagttctggcaggcattggtgttgaacagcgggcccaggccgtcgcgtgcggtggtggtggacggggcaatgacccaggggctgcgaaagaaactgttgccgacgctgaaatccaggcggcgggtgggcgccaggttggccgacggcagggagaatgcgttctggtcgcgcttgttcaccgtcgtcgcgccgcccgcgcgtgattcacccggctctgccttggtgaaacgcggcgcgtcatcgcaggcggccaggctcaaggccagcactgctgcgcacaggcgaaatagcgaacggaacatcgagtttcctgaacgggggctgaaaataaggtcgcaaagtctaacagggcggggcggattgaataagagcaattatcgtttggtggtatccgattcattcccgctagaatggccgcacatttttctctggaggtcgccaatgcaggctctcgacgctttgctcaaccgtgtttccgtgccgcgtttgctggagccggcgccgacccaggagcagcgcgacgtgctgttcgccgccgccatgcgcgcgcctgatcatgggcaactgcgcccgtggcgtttcctcactgtagaaggtacggcccgtgagcagatgggcacgctgctggccgaagctgcgcgtttgcaggacgccgacgcaccgcaagccgccatcgacaaggcgcagaacggcccgttgcgtgcaccgctggtggtggtggtgattgcccgcctgcaagagcatttcaaggtgccgaaatccgagcagctgctggcggccgcgtgcgcggcgcacggcattctgctggcggcgtacgcccaggggattggtgcggtgtggcgcaccggtgagttgtcctactcggcacacgtcgccaaaggcttggggctgacggcggatgaggaagtgattggcttcctctatctgggcacgccgcagaacccgccgcgggttgcggggaaagaagatgtggcggcgtttgtgcaggcctggccgggtctgtaacccggcacagttctgctctgtgtgggagctggcttgcctgcgatagcggtctgtccgtcaatgagtgtgtgactgggccaccgccatcgcgggcaagcccggctcccacaggggatcctcatcgttttggagagtgggtttacaccttgaactgatccatcagtgtcatctgctgggtcgccagggcattcagctggctgctgatcgccgctgactcggtggcctggccggtgagggtttcagtcacggtgcggatcgccgacacgttgcggttcacctcttcggccacggcgctctgctgttcggcggcgctggcgatttgcaggttcatgtcgctgatcaccgtcacggcgtcgctgatcttgcccagcgcctgcacggcctggtggatctgcccggcattgctttgagcctgatgctggctcgaatgcatggtcgccaccacgcccctggtgccgctctggatgcgttcgatcaccaggcggatttcttccactgagtcctgggtgcgcttggccaggttgcgcacttcgtcggccaccaccgcaaacccgcgcccgctttccccggcgcgcgccgcttcgatcgctgcgttgagggccagcaggttggtctgctcggcaatgctgcggatcacttccagtaccgagccaatctgctcactgttcacggccagggcttccacttccgtcacggccttgctgacttcgtcagcgagggtggtgatgtcgcgggtgctctgctcgatgatcgacatgccttcacgcgccgactgatccgccccgcgcgctgcgctggcggcgttggaggcactgttggcgacgtcatgggcggtggcgctcatttcgttggaagccgtggccacctggtcgatttcgcggaactgcacctgcatgccttcgctggtctggcgcgcgatggccgaggactgatccgccgtgccacgcgcttcggtgatactttgcttgatctgcgcgatggtcggttgcagcttgtcgaggaagcggttgaaccagttcaccagttcgcccagttcgtctttccgggtgtaggccaggcgttgagtgaggtcgccttcgccgctggcgatattcttcagcatcgcggccacgctgttgatgggacgggtgacgccggtagcggtcagccagatcaacagcaagccgagcagggccgcagcggcgccgaccagcaaggccttgagtgtgccagtggcctgggctttatcgagtacgccttgcagcttcaccgtgtccgccagcatcacggccttgggcagtttgatcacgatgccccaggatttggcatcggcaatcggcttgaccgggtacacggcgcgaatggtgtcgtcctgttcgcggatcatggcggtgccgtttgccagcagttgcacgatttccttgccttcggcaccaatggtgtcgatcaggtttttgccgaccttgtccggctggccgctgtaggccgcaatcaaaccggtgctggagagaatctccaggtgcgccgcgccgtcgaacagttctttttgcgccgcgtccgttaccgcttgcagggcgttgagggcgaggtcgataccgaccacgccgataaccttgccgtccacgatcaatggcaaagcgatggtggtcatcagcaccgacttgcccgctacgtcatcggcgtatgggtcgagcaggcaaatgttgcgggtgtcccgtgggcaggtgtaccagatgttgtagggcgtaccgctgaggttgggggtggtcttggtcaggtcgtcttcgaccatgatggtattcaggccatcgccgccggcgcggctccagtagctggagaagcggcctttttcattggagacgcgggccttgtcgtcgatgaattcgctgtctttgccgtccagtccgttgggctcgaacgacagccagatgccgagcaccttgctgttgcgctcaaaggtggtcttgaggctctggttgagttcttcacgcagcgccccggcgtccagtccgcgtttggccgccatggcgcgcagccctttgatctgatcggccagtgcggtgacgacggtgaggtcttcgccaaaggttttctgcaactgcaccgcctgttcggcagccttcgcctgcaacaggttctgcacgctatgggtgagcattcgcgagcttgaatcgctgaccaggtggttgttctggtcggcctcgtacaggttgatgccgacgaccagcgcaatcacccccagaaggcaaaggccggacagcagcacgattttcaagcggatggagagggtgtcgaacataggatcactcgcgattggacttgttggaatgcacgcagggcgagccaaatccattcggcgctatgtccggaacatcggcgtaacggggtgtttcatgagaggaaggcgatgagcggtagggaaacggctacaggctccgttatacgggggctgcgaggcgttcagggcgtgaccagatccacaggttgcccaggctcattccggcgattgccaggtagatcggccaaccatggtcgagcatcaccagcatcaagccggcgcacaccagcatgctcacggtggcgctgattttggcgcggcgcgcgatgatcttgccgttgcgccaattgaacaggatcgggccgaacaggcggtggttttccagccatgcgctgaggcgtggtgagcttttggtggcagcccaggcggcgaggaggatgaattcggtggtgggcaaacccgggatgacaatcgcgattaacccaatgcccaggctgacgtaggccagcaggccgaagaggagctgcgcgattttcgaagtggattgggttttaccggtcatggggtcgtgtacgtgaagagctgcaaaaagtcagatcagaacggggtcaacctgtgggagctggcttgcctgcgattgcatcggctcaatctggcagacagacgaggtgacagcatcgcaggcaagccagctcccacatttgattgcatttcaatcagggggatcaggccagttcaggggcgctagcgtacgcctgttccagcaacacggtgaagcgcacgaacgcgtcgattgcacctttttccgcggcggcttcttcttcagcggtgaattccaggccgtcgagggtgcgggtgaaactcttccagccttccgcgcggccaccggctggctcgcccaagtggcgggctccgaaggtttcgctcaggcccaggcctacggcacgtttgatcaggaaggcagcgcccagcttggagccttcggacacgaacagccagcccagggcttcagccttgcttgggtttttcacggcgccagccaccggggcaggcacttcggtgtccaggtcgccgaggtccagtttggcggcttcggcgcggcagcgttcggccaggtccgggacgatcgctatcagctctgggtcgttgtacagggccaccagttccgactggaacaggtattgcgccaccacgaaacgggcgaagttggcctgggtttcaaacggggcgtgggctttgaccagtgcatcgagtttggtgtgcggcgcgtgggtgatctggttcaggcgctgggagcgcaggctcgggcgttctgcggtaggggaagcggtcatcggaaaagtccttgagaagggtagcgccttgtggctctaaagagagccgttatcaactagacgaacaagaagacgcggcacagtaaaaaatcctcaccccgccgctgaaattccggcggggtgaacggggcgtcagatatcccagatcaggttgatcgcaaagttgcggcccggttgggtcaggcggtcgaggttggccgggccggtcacacctgcttcgccgacgctgtcgtagctgcgcacgtcatcccagttccagtatttcttgtcggtgaggttgtagaggccgccgttgatggtcacgtcgttggtgaccttgtagaaagcggtcaggtcgagcacgccaaagcccggggtcttgaacggtgcgctggtgctgccgtcgggcgcgtggaaggtggtgctgtccacacggttctgctttttcaccagggtccagctcagcaggccgccgtagttgtcctggtcgtagcccaggccgaacacgcctttgagcgggttgacgctgttgagcggctcgccgttgtcgtcgttgcggccataggtgtagcccaccgaaccctgggtgtagaggccttgcggtgcgccgaatgcatctaggttcaggcggcctttggcttcgatgcctttgatggtggcgtgcttgatgttgttggcttcgaaggtttgtatatcgccgccggcgaccgaggcatcctcgtcgataaagtcgcggtacttgttgtagaacaccgcgatgtcgaaggatccctcgtcgaaattgccgcgaatcccggtttcgatgcccttgctggtttccggcttgaggttcgggttcggctcgacggtgtagcctatgttcaggttctcaaagcgaccatagagcgctttggccgatggggtgcggaagccttcagcgtattgaccgaaccaggtgtagtgatcggtcaacgcataggtcaggccgaatttgggggtcacacggtgccaggttttatccttgtcgctgaccgggtatgcaccggtggggttcacggtgttgaggaattcctgggtcagcttgggcttgagctgggtatagtcgtagcgcacagcgggcaggaacgtccatttgtcccaggtgatctggtcctgggcgaacagcgagtaggtgttgatggtcgggtccgggaagtcgctggacttcttcacgctgtcggcggctgacgggctcggtgcgccaatggcggtgcaaccactgccgacggccaggcaggtggcggagccctcgcgcgagccggtgactttctgctgtttcagggtggtgccgtaggtcacttggtggtcggtttcgccgaggctgaaagccttgtccagttgcgcgtcgaatacccattgtttttcttcatacagcgtgtcgcgggtgcgcaatacgcggcgtgacggctggtagatctcggcggtggtctggtcggtcttggcgatctggtagttgaggctggtcttgatgtgatcggcaatcggcgagtcgagggcgaagcggttttcgatggcgaaacgctcacgggtgatggtgtcgttgcccgaacgcccacgatagaagttgaagccgcggccgccgacgaacgggccgcccacggcgtttttcaggtcgacgtcacggtcatccttgaacttctcgtaggtcaggccaaggcggttgtcgtcgccgtagttccagcccagtttggccagcacgttggtggtgcgcgcgtcttccgggttggcgccggtgcgggccaggccggtggcattgttgccgtcgtaggattccatttcatggccgttgcgctggctcaggtgcagcaagccgtcgaagtcctgcacgcggccggcgacggtgccggaggtcagccagctgtcgtctgccgagctgtagccggttttcaggcgggcgccgtagtcctggccgggtttgatgatgtcatccgggtcgagggtgaagtagctcacggcgccgccgatggcgctgctgccgtacagggccgaagccgggccgcggaggatttccacgcgcttgacgatttccgggtcgacgtagttgcggcgggttttggcgtaggggccgttgaagaagttgtccggtacttccacgccgtcgacctgggtgaggatgcggtcgccgtcgatgccgcgaatgttgtagcccgaattgctcgaacggccgccggcgccgccgacagagacgttgggctcgtagcgcaccagctcgcgaatggtgttgacgttgtcgcggtccagttcctggcgatcatgcacggtgacggtgctgggcacgctgttgacgtcctgctcggtacgggtggcgctgatggtcacctgttgcaggttgacggtgctgcccgccgcgcgtttttccagcacgatgttgttgttgcccagtttgcggtagctcaggttggtccccaccaacagccggtccaaggctttttccggcgtcagtgcgccgcgtacaccaggggacgaaacaccctggcccagctcggccggcaggccgacttgccagccggtcacgctggtgaaggcattcagcgcggaaaccagcggctgttgctcgatgctgaagctgtaattgccgtggctgcgcgcgaccggctcggcggcggtggcggccatggctggcgcgctggccagcaggatggcggcggtcagcagggacagaacgggcgaagaagaccggcggttgaaacgagaggacatcgagagcgctccggaggtacgaatcttatagttgcgaaccgaatcaaataggaatcagttgcattggctaagacgagacgtacagccgacagctatcgagtaaaaataattctcatttagttcaaaatcaccagtgccgggtattccgaaagcttggcggaggtgatgtgggccagtgaacgcaccacgtccaaaggctggtcgaggcgataattgccggtgacggcggtgctggcgagcttgtcgttggtgttgacgatccagcccgggtaatagcggcgcagttcggcaagcacttcgctcatcgggcagttttcgaagaccaggcggccctggacccaggccaggtctttgcttgcgtccagccgggcgggttggccgaaacctttggggccgatgcggatgctttcgccggcgcttaaacgtacgcgggcatcgtcgaaggtgttgctcaggtccacgtcgccgcgttgcacttgcacctgggcttcgccattgaggtagcgcacggcgaagtcggtgtcgcgcacgctggcgcgtaccgggccggcgtcgatttccagcggcaggccacggctgggcgccacttcgaaaaacgcctcgccctgatacaggcgggccacgcgttggtgatccttgatgctgctggagaacgccgagttggtgttcagcagcaccttcgagccgtcgtccaattgcaggcgctggcgttcgccgaccacagtgaggtggtccgcttgcaggcgcacgggcaggttgctgaagctgaacaggccgatcaacagcgcggcggcggtggccaagggtttccaatgcggtttgatgcggcgcaaaaacgttggtttacgcggcaccgcgagggccacggcggcactgtgcaccggcgcgccgccccaggcagcctgcgccttgctgaaggcgtgaacgtgcgccgggtcgctggccagccaggcgtcgaactcggcctgctgcccgggctgcgggcattgcaaggcgatcagccagtccagggcctggtccatcgccgtgtcttgcagcacctcatgagccagctcatgggggcgcagtttattcgggtccgtcacggtgttcctcgggtcttcgccacgttctattcattttttcctgcagcctggatcgacgcttctgtcggggaagcttaaggctgatccagccgttcggccacacctacacagatggccatgatcaatttcagttccttttgcacggtgctcaaggacacttgcaactgatcggcgatctcctgatagctgcacccgtgcaggcggctaaggatgaaaatctgctgctggcgggcgctcaactggccgaggctgacgctcaggtgctccagcaattgctcggcctgggtggcgtcttcgggcgtgctgatgggggcggcgacgctttgcaggacgtccagcggaacgtcttcctgcaacatgcgggcttgaattcggcgcgaacgcagatggtccagcgccaggttacgcgcggtttgataaacgaagggttcgaggtgatcgatcggccgctcgctgagggcccgggtcacgcgcaggtaggtttcctgcaacaggtcctcggcggtgctgtggtttttcaccatccgctgcaaggtgcgaagcagaatcacccgttgggtgagaaagacgtggttgaagcgagattggctcacagtgataccagaccgggatgcagttaatgataatgcttatcatcaactgaaatggcaagtggctatttctgtgaacctgtaccgatcaaatgtgagcgagtgcttttgtgggagccgggcttgcccgcgatgcaggcacctcggtattacggtcggaccgaggtaatgctatcgcaggcaagccagctcccacacaagccagcggcggcaggaaattactccgcgttgcagagcgctaggcagttatccagcatccggttggagaagccccactcgttgtcgtaccaggccagcactttcagcaattttccactgactttggtgtgattggcatcgaagatcgacgacagcgggttgtggttgaagtcactcgaaaccagcggcagggtgttgtaaccgaggatcttcgaatgctggctggcttctttaagcagcgcgttgacttgctccgccgtggcttctttcttcagcgtcacggtgaggtccaccagcgacacgttgatcaccggcacacgcaccgccatgccggtcagtttgcctgccagctccggcagcaccaggcccaccgcttcagcggcgccggttttgctcgggatcatgttctgggtggccgaacgcgcgcggtacgggtcggtgtggtagacgtcggtcaggttctggtcgttggtgtaagcgtgaatcgtggtcatcaggccgctttcaatacccagctcgcggtgcagcacttgagccacgggtgccaggcagttggtggtgcaggaggcgttggagatgatctggtgggattgacgcaaaatgtcatggttcaccccataaaccacagtggcgtccgcgcctttggccggggcggagatgatcaccttgcgggcgccggcggtaatatgggcggcagccttgtcgcggtcggtgaacaggccggtgcattcgaacaccacgtcgatcttgtgcgcagcccacggcaggtcagcggggttgcgaatggcactgacagcgatccggtcaccattgacggtcaggctttcctgatcgtgggcgacctctgcttcgaaagtgccgtgtacggtgtcgtatttgagcaggtgggcattgatcgaactgtcgcccaaatcgttgatggcgacgatctgcaaatcctggcggtagccttgggtatacagtgcgcgcaggacattacggccgatacggccaaaaccattgattgcgatacgaagagtcattggaaagtgcctgtcgtcgatttgttgtaagaattacaagattattcgcataaaaatagaaaacaagcctttttagtggcaatattttgttcaatctacaacgagtgacctgaatcaactggtccgatgatccaaacgacaccctgccatcccatgcgctgcgggcgtttgatcagcatagacactcaggtcgccacatccgttagcctggagttctacacatgcatccccgcgttattgaggtcaccgaacggcttatcgcccgcagccgtgcaacccgcgaggcttaccttgcgctcattcgcggcgccgccagcgacggtccgatgcgcggtaagctgcaatgcgccaactttgcccacggcgtggccggctgcggcactgaagataaaaatagcctgcgcatgatgaatgccgccaacgtggcaattgtttcgtcatataacgacatgctctcggcgcaccagccgtacgaacacttccctgaacaaatcaagaaagccctgcgtgaagtcggctcggtcggccagttcgccggcggcaccccggcgatgtgcgacggtgtgacccaaggcgagcccggcatggagctgagcctgctcagccgtgaagtcattgccatgtccacggcggtagcgctgtcccacaacatgttcgatgccgcgctgatgctgggcatctgcgacaagatcgtgccgggcctgatgatgggcgcactgcgctacggccacctgccgatgatcttcgtcccgggtggcccgatgccgtcgggcatttccaacaaacagaaagccgacgtgcgccagcgctacgctgaaggcaaagccacccgcgaagagctgctggaatcggagatgaagtcctaccacagcccgggcacctgtactttctacggcaccgccaacaccaaccagttgctgatggaagtgatgggcctgcacttgccgggcgcctcgttcgtcaacccttacacgccgctgcgtgacgccctgacccgcgaagccgcgcaccaggtcacgcgcctgaccaaagccaacggcagcttcacgccgattggcgagatcgtcgacgagaagtccatcgtcaactccatcgttgccctgaacgccaccggcggttcgaccaaccacaccctgcacatgccggccatcgccatgtcggcgggcatcatcctgacctggcaggacatggccgacctctccgaggtggtgccgaccctgtctcacgtgtatccaaacggcaaggccgacatcaaccacttccaggcagcgggcggcatgtcgttcctgatccgcgagctgctggaagccggtttgctccacgaagacgtcaacaccgtcgcaggtaaaggcctgagccgctacacccaggaaccgttcctggtggacggcgagctgatctggcgcgacggcccgatcgaaagcctcgacgaaaccatcctgcgccccgtggcccgtgcgttctcgccggaaggcggcttgcgcgtgatggaaggcaacctcggccgtggtgtgatgaaagtctcggctgtggcccttgagcatcagatcgtcgaagcgcctgcggtggtgtttcaggatcaacaggatctggcggatgcgttcaaggccggccagttggaaaaagactttgtcgcagtaatgcgcttccagggcccgcgctccaacggcatgcccgaactgcacaaaatgaccccgttcctcggcgtattgcaggaccgcggctttaaagttgccttggtaacagacgggcgtatgtccggcgcgtcgggtaagatccccgccgcgattcacgtcaaccccgaagcccagagcggcgggccgctggcgcgagtgcaagatggcgatatcattcgcgtcgatggcgtgaagggcaccctggagcttaaggtgaacgccgaagaatttgcagcgcgcacgcctgccacgggcctgttgggcaacaacgtgggggcgggtcgcgagctgtttgcatttatgcgcttggccgcaagctccgcagagcagggcgccagcgcctttacctctgccttggagacgcttaagtgaagcttgcgctggtcggtgatatcggtggcaccaatgcccgttttgcgttgtggcgcgatcaggaactgcattcgattcgcgtgcacgccacggcggatcacagcagccctgaggaagccatcaaggtttacctcaaggaagaaggcctggaaatcggcgacatcggcgcggtgtgcctttccgtcgccgggccggtgagcggggatgaatttaaattcaccaacaaccattggcgcctgagcaaaactgcgttctgcaaaaccctgcaggtcgatgaattgctgctggtcaatgacttcacggccatggccctgggcatgacccgcctcaaacccgacgagttccgggtggtctgcgaaggcacgccggaagcctggcgccccgccgtagtcatcgggccgggcaccggccttggcgtcggcaccctgctgcatctgggtgaaggccgttatgcggcgttgccgggcgagggcggccacgttgacctgccgctgagcagcccgcgtgaaacccagctgtggcaacacatctacactgagatcggccacgtcagcgccgagaccgccttgagtggcggcggcttgccgcgtgtgtaccgcgcgatctgcgcggtcgatggtcacgagccggtattggacacgcccgaagccatcacggcagcaggcctggccggcgacccggtggcgatggaagtgttgaaccagttcagcatctggctgggccgggtagccggtaacaacgtgctgaccaccggtgggcgtggcggcgtgtatatcgtgggcggggtgattcccaggtttgccgacttctttatcaacagcggctttgccaagagtttcagcgacaagggctgtatgagtgactacttcaagggcattccggtgtggttggtgaccgcgccgtattccgggttgaccggggctggagtcgcactggagcaggcatttgcgtaggtcgtgatgtcgccatcgcaggcaagccagctcccacatttggaatgcattcccctgtgggagctggcttgcctgcgatgaggccctcaagaacaccccataacaacaaggaggaccccgtgagcgtaatcagtaaatccattctcctcgtcgacgacgaccaggaaatccgcgaattgctgcaaacctacctcagccgagccggtttccaggtgcggggcgtgtcggacggcgcggggttccgccaagccatgaatgaggcgccgtgtgacctggtcatccttgatgtgatgttgccggacgaagacggtttcagcctctgccgctggatccgccagcacccgcgccaggcgcaggtgccgatcatcatgcttaccgccagctccgacgaaaccgaccgtgtgatcggcctggagctgggcgccgacgactacatcggcaagcctttcagcccgcgcgagttgcaggcgcggatcaaggccctgttgcgccgtgcccagtttggtcaggagcgcagcagcggcggtgatgtgtgggtgtttgatgagtggcgcctggacatgatcagccaccgcttgtttcacatcgacggcgaagaagtgattctctctggcgccgacttcgccctgctcaaactgtttctcgaccacccacagcaaattctcgaccgcgacaccatcggcaatgccacccgtggccgcgatctgatgccgctggaccgtatcgtcgacatggccgtcagccgcctgcgccaacgcctgcgcgacacggaaaaacctccgcggctgatccgcaccgtgcgcggcagcggctatcaactggcagccagcgtggttgccggcaatgcccactgagcatttgaccgagcgccgccgcttcccggtgccgcgttcgttgcttgggcggatgctgctgttgaccttgctggcggtgttgttcgcccaagcgctgtccagcgtgatctgggtttcgcaactgcgtgctacccagcttgaaggtctggtcaccagtgcccgcagcctggcgcattcgatgacggccagcgtgagttatttccgttcgttgccggtggcctatcgcccgttggtccttgatcaactgcgcagcatgggcggcacccgctttgtggtgaccctcaacgaccgcccgctggacatgcagattctgccgcagaccccgcgcaaacaagcggtgctgcaagcggtggatgaagtgctgcgccagactctgggcagcgacgtgcacatttcggtggagttcgtcagcgccgaagacctgcgcatcttcaatgcggggctgaagctcgacgaactgccgcgctcctgggcgcattacgcgctgaccctggagccggtgaacccgccggtgctggtcacccagatccagcttgcaccgggcgaatggctgtacatcgcctcgctgttgcccgagccctacaccagccttgaagaacaaggccttccgtcgcagcaagtgtggtttatcgtgctgaccagcggctttttgctgttgttcatcggcctgctggtgcactggcaaagccggccgctcaagcgcctggcgcgcgcggcgcgggacatgtccctgggcgccgacgtggaacccgtggccgaaggcggtggcagcgaagtggtggaagtgggccgcgcgttcaacgccatgcgcgagcgcatcagccgctacctgaccgagcgcagccaattattcagcgcgatttcccacgatttgcgcacgccgattacccggctgcgcctgcgtgtggagttgctggaagacgagaacctgcaaaccaaattcggccgcgatctggatgagttggagctgttggtgaagggcgcgctgcaatgcgtgaaagacaccgacattcacgaaaacatcgagccggtggatctcaaccatgtactcgattgcctcgtcgaaccctacctggcacccaacggcaatggccgcatcacccaggaaggccgcgcgctgaccacctacccgggcaagccgctggcgctgaaacgctgcattggcaacctgatcgacaatgcgttgaagtacgggcagaacgcgcatttgcacattgaggacgatggtgcggaatttatcctgcatgtggacgatgaaggtccgggcgtgccggagcagcggttggaacaggtctttgaaccgcatttccgcctggccgggcagcagcagggttacgggctggggttggggattgcgcgcaatattgcccacagccatgggggtgaagtgagtttgcagaatttgcgcgatggcgggctgcgggtgaccttgcagctaccccgcaccctggactgacttcacgcagaaccaatgtgggagctggcttgcctgcgatagcggtgtatcagcggcagatgtgccagctgacccacagccatcgcaggcaagccagctcccacattttgatcttcatcgaatcagacgctctggcgcatccgggccaggtcgcgcaaaggcggtgcgccaaacaaccggctgtattcccggctgaactgcgacgggctttcataccccacccgataccccgctgccgaagcttccagcccttcggcgatcatcaaacgccgcgcttcctgcaagcgcaactgcttctgatactgcaacgggctcatggcggtaatcgccttgaagcgatgatgcaaggtcgagacgctcaggttcacttccttggccaggtcatcaatgcgcagtggttgttcgtagttgccattcaaccacttgatcgcctggctgacgcgatggctctggctgttggccacggcaatttcgtacagccgatagccctgcggcccacgcagcagacggtaaagaatctcgcggttgatcagcggcgcgagcatggcaatgtctttgggtgcgtccagcaagcgtgccaggcgcaggaccgcgtcgagcaattgagcatcgatacggtccacatacatgccacgcgaggtcgggcgtgaaggtacacccatcgggccggcctcggcgatcaacgcggtgagctgtgccgggtcgatattgatgcgcaccgacaggttggggtcttcaggcgtcgcctcgaggatccgcccggccactggcatcgccaccgagaacaccaggtaattgagcgggtcgtaggcgaagatttcgtcggccaggcgcacttccttgctgccgctggcgaggatgcacaacgcgggctccaccagcaccggcatgaaatcgcgcggcgtgttgtggcggttcaggtacaacgaggtgatcgcggtgccgtaggagccatcttcccaagtgtggcggtgcacgatgctggccagttcggcgcgctgcttttccatctcggcatccagcggcagggatttatgttcaggcgacgacatggggcgacctctgcaggcttctttgatgggttcagcttagcggcggcttttcaaaaagtgttacgtcgattctgcacaatccttgcctgatcctgcggcaagtcgtgaatcaggcaaggccatcgcctgtcatctgcctgaaacactgaacatgggcatggaataaaaccggcgggccaaacgtcgtatctacgcatctcgcaggattgtgcaataagcctgcaggaattgactaaccgcggccacacccgcgccgttatctttgatcctgtggcaacacgccctcacagtgcttgccgagcatcacttctcaacgggagagtcgaacatgtccacccccattcccgcgagccatatggcctttatccgcgcacgcagcggttgcagcaccgaactcggtgcacgcttgagcagtttgattgaaccgggccgtcaggctcagggttgcctgcaattctcgttgcagcattcccaggtagaccccgatgtatggctggtctcgggtttctggagcagcgagcaggcgatgagcgcctacttcaattctccggccttgatgatctttaccgagctgttgaatgacatggtggttcgcagcatggacttccagaccttcaccgatgcatccgctgcacacgcctacggcgagtacctgcaactcgccggttgagggttacaatggccgactttccattggccaggacctgcaacatggcacgtaaacaatttgcccaccacgaagccgtttccgccgtagtgccgggagaaggcggctacagcgccgccgttgccgtcaaggcactggatggcatgggcgcaccgcagtttcacaagatccttgatgggcagaagttcaagacggcttccgatgctgatgatgcggcgacgacgcagcttgagcgattggttgatgtagacgaagaaggtcaattgacctgggcaactgccgccaactgaatgatcaacacagatcaaatgtgggagccgggcttgcccgcgatagcggagtgtcagccaatgcataagttggttgacccgccctcatcgcgggcaagcccggctcccacattgctctgtgcagtttgttgatcagtattccaatcagcgaggccgatacatcttgaacagcgcctccggccccagctggaagtaatccgccggcccaccgccgcgcaagatcggctcggccgcggcggtgtcgtagatgccgtccttgagcaaccacttggcaatgtgcaccgcaaccacttcacccagcaccagccagcttggcaccaatgccttgtcggcgcgctgcaactgaatgatctgcgtaaccttgcactcgaacgccaccgggctctcgcccactcgtggcacacccacaattttcgaagccaccggcgtcagcccggacaactcgaattcgttcacctcgggcgataccgccgcacaactctgattcatctgctcggccagcgggcgggtggccaggttccacacaaactcgccggtctgttcgatgttgttcaggctgtctttgcgcccgacgctggaaaaaccaatgatcggcggaatgtaattgaacgcgttgaagaagctgtagggcgccaggttcaggcggccttctgtgtcgtgggaggaaatccagccgatgggccgtggaccgacgatggcgttgaacgggtcatggggcaggccgtggccgttggcaggttcgtagaaatggatatcgtcggacatggccggggtttcctgctgtgggtgtctgtgagttggccatactgcaagccatggccgcgaatttccatcgaaccgatggaattttcattcatcgcccacctatttttcacagctccaccttcagtctgcgctgcaagtcgacacccccacccagtcggcccattgagagactgagcttcggagccttccaacccatgaataaacttcctcaaatcaccctggcgttctgggtcatgaaaatctgcgcaaccaccctgggcgaaaccgccggggacttgctgtcgatgaccctgaatgtgggctatgcgatcagttcgatgatcctgatcagcgtgtttttcgtcaccctggtgacgcaactctggtcgaaaacctataacccggtgctctactggatcgtgatcctgtccaccagcaccgccggcaccacgatgtcggacttcatggaccgtacgctgggcctgggctatgccgccgggtcgatgattctggtggtgatcctgatgatcatctttgcgctgtggcgcctcagtggcgactcgctgaacgtgaacaaggtgcagaccttccgcggcgagctgttctactggatggccatcctgttttccaacacgttgggtacggccttgggcgatttcctggcggatgactccgggttgggtttcgccgggggggccttgttgatcggttcggccatcgccgttgtggttgcgctcaaatacttcacccgaatttcgtcagtgctgctgttctgggtggcctttgtgctgacccgaccgtttggcgcgaccttgggcgatgtccttaccaagccccatgaaaagggcgggctggatttcggcaccattggttcgtctgccgtgttggcggcggtgctggtggtgatgattgcgggggcgtcgtatgcgcagcgccggtatgggcgccagcagccggtagagctgacctgattaaaaaagtgggagcgggcttgcccgcgatagcggtgtgtcagtcactgggttcagtgctgataaaccgctatcgcaggcaagccagctcccactttttttagtccgtggtgatgcgcgaatgcttgcgggtgtctttcatggtcgcgtaaaccgccagcgaaatggcaatacacgccgtcacgtaccagtaatacccggtctccatgccaatgctcttgaaccacagcgcgatgtattcagcggtaccgccgaagatcgacacggtcagcgcatacggcaggccgacgcccagggcgcggatttcggtggggaacaattcggccttcaccacggcgttgatcgaggtgtagccgctgacgatgatcagcgctgccatgatcaggaaaaacgcgccccaccagctctggatggtgtgcagggtggtgaggatcggcacggtaaacagggtgccgaggatgccgaaagcgatcaggatcggccggcgccccaccttgtccgagagccctccgaccaggggttgcaggcacatgaacaggaacagcgtcgcggctgaaatggtggtggagtcggaaatgctcatgccgacggtgttcaccaggtatttctgcatgtaggtggtgtaggtgtagaacgccagggtgccacccattgtaagtccgacgacggtcaacacttccttggggtgacgcatcaaggtgcgcatggcgctttccttggctttttccttcttggtgaaggactcggtttcttccatgccgcgacgcaagtacaacgcgactactgcgcagagggcgccgatggcgaacgggatacgccagccccaggcatacaactgctcagtggtcagtatttgttgcagcacaatcagcaccgccagggcgatgagctggccggagatcagggttacgtactggaaacttgagaagaagccgcgacgttccttggtcgccatttcactcaggtaagtggccgaggtgccgtactctccgcccaccgacaggccctgcagcaagcgggcgaataccagcaggattggcgcaccgatgccgatggtgtcgtagcccggcgtcagcgcaatcagcagcgagccgaagcacatcagcaataccgaggccatcagcgcggcttttcggcctttgtagtcggcgtagaggcccatcagccagccgccgatcgggcgcatgatgaagcccacggcaaagatggcggcggtgttcatcaactgcgcggtggaggagccagcggggaagaaggctttggcgaagtacagcgagaaggcggcgtagacgtaccagtcataccactcgaccatgttgccgaccgagccgctgaagatcgatttgatccggctggacgtggtgcgttctttcgccggcgcggccgccgaccccagaggcaaggcgttggagttatccattgaaggatccttcatctaattgtttttgtggagcgtgcgcgagcgccgcctggttcgggctatagcaggagctgtgccaggtggatgaaggcccggaatagaggggggtgaggatttttttgagcggaaagttgctgatggattttgggtgatgagcggaaatccgcttatggcagctggcctcatcgcaggcaagccagctcccaccgttgaaggtattcacagatcaaaaatgtgggagcgggcttgcccgcgatagcgtccttacagtcaacgggagattcgatctaaagaaacgaatcccgcaccaacccatgccgctgcatcttctcgttgaacgtacgccgcggcagttgcagctcggccagcaccgccttgatatcgcccttgtgccgcatcagtgcagccttcaggcaatgggcctcgaaagcctcctgctgcgccgccagggattgcccggcctccacaaattccggctccggctcgcccaggcccagcacctgacgctcggcgacgttggccaattcacgcacattgcccggccagtcatggctgagcaggcgccccagttgcgggccgctcaagggttcggcagtgcggcccaaacgctcggcggcgctatgggcgaagtgttcgtagagcagcggaatatcttcgcggcgctcgcgtaacggtggcaggcgcagttgcgcaacattcaggcgatacgccaggtcttcgcgaaagcgcccggcgcgggcctcttccaacaggtccggcttggtggcggcgatgatgcgtaaatccacatgaatgctttggttggaacccagccgctccagcttctgttcctgtaatacgcgcagtaatttcacctgttgagccagcggcatgctttcgatctcgtcgagaaacagcgtgccgccgtgggcgtattccagcttgccgatgcgtttgccctgagcgccggtgaacgcgccactttcatggccgaacaattcggcttcaaacaactgctcgggaatagccgcgcaattgagtgccacaaagggtttcttcgcccgtggcccgaagtcatgcaggcaacgggcaaccagctctttgccgctgccggtttcgccccggatcagcacattgaccggcaaggtcgcgaggtccagcacctggcgccgcaggttctgcaaaccccgggacacacccagcaagctggactccagctgtgcgcggtggtcagcctgttgatgcaggcggcggttttccagaatcagcccgcgcttgtccagggcgcggcgcaggctgttgagcaaagcgtcggggctgaagggcttttccagaaagtcgtaggccccatcgcgcatggcctccacggccattggcacgtcgccgtggccggtcagcaggatgaccggcaagtcggcatcacggcgttgtacttcggccagcagctccaggccgctcaggcctggcatgcgcacatcgcttagaatcacaccgggaaagtccttgggcaggcgcgccaggcattcttcggcgcggctgaacaactgcacctcaaaccccgacaggctcagccattgctcgacggccgtgcgaatgctggcttcgtcatcgaccacaatcaccgcgttcaacataggtcgggcgtctccagcgcgataggcaaggtcagggtaaacaccgcgccgtcaccgcggttgcccgcgatcaggcggccgcccaattcgtgcacgatagcgtaggacaccgccagccccaagccgagcccgtcgcctaccggtttggtggtgaagaaggggtcgaacacgctgttgaggtgctcttctgcgatcccgccgccgctgtcactgacgctcaaaatccaaagctgctggtcggcgtgcaggcggatttccagacgtttgcgcggtttgtcggccatggcgtcgagggcgttgcgcagcaggttgatcagcacttgctccaagcgaatggcgtcgccgcgtacggtggccgggcgggtcaggtccagcactacgccgatggcttcatcgcgcaaacgcgcgtcgagcagatgcagggactggtcgaccaccgtggccaggtccaggcgctcgcgcaggccgctcgggcttttgcgtgcgaacgtcttgaggtggccggtgagcgcggccatgcgcgtgagcatctcgtccagcggggtgagcgccttatacgcatcgtctacgcggccgtgatcgagcagcaggcgcaaggtcgccagttgcatgcgctgggcagtcagtggctggttgatttcatgggcgagtgccgcagacatctgccccagcgccgccagcttggctgactgcaccaagccgtcctgagcggtgcgcagggcttgggtgcgttcttctaccaactgctccagctcttcgcggctgcgctgacgcaaacgagccaggcgccagcgttggttcaggaacagcaccaggaacaccagcgccagccaggaaccggcggcggcaaggccggcattgcgttggtcttcgaaggcgaactgcggtttgcgcagcaggtgcagcgtccagccttcggccttcaatggcagggattcccagatgtaattggcgttgccgtccgggccgttgacgcgcatcaggtggctgttgtcgtcgaaacgctgcagggcatctgcttgcaggggctgcaactgctttttgtcgtactgccgggtgcttttgagttctgcgtggtcgctgtcagacaaggggcgcagggcgcggtatcgccagccgggctggttggcgataaacacgatgccgcgcgcatcactgaccagcagcaggtcattgccctgagcccattcgcgttcaagttcggggaactccagcttcacgaccatcgcgccgaggaactgctggttctcatctaccacggcgctggagaggaaataaccgggtatgccggtggtgacccccaccgcataaaagcgtccggtcccctggctcaatgtttggcgaaagtacggccgaaatgcgtaattgtggcccacataactgcttggcaggttccagttactcgcggccacggccaggccggtgcggtccatcaattccagggtggaagactgcgccgcaccgttgatccgctccagtttgcggttgagcacgtcttgggtcctggcatccaccgggtttttcaaggcgctgatcatttccgagtccagggccagcacggcgggcagggcgcggtagcgttcgatcagggtgtgcagcgagttggcgtatagcgccagctgttgattggcgcgggcggcgtcgtccaccagggcctggcgttcggcatggcgggtggccagggccgcggccagtagcgcaccggcgatgatcagcagcgagtagaaggtcaggcgcagggggcgagggatagcgatcatacggtgaggggcaggcacggtaaggggagtgcaccatagcatgcactgccgggatcttgtggcaagccaactcccacatgttcgagttcatcttgaaaatagctgcagccataaaaaaggcgaccgggccatgggccgggtcgcctttctccttgcgggcgaggtgcttactgcacttctaccgccaggctttcactgatctttttctgccagatggcaggaccggtgatgtgcacggattcacctttgctatctaccgcaacggtgacgggcatgtctttcacgtcgaactcgtagatcgcttccatgcccagctcggcgaaagcaacaacgcgcgacttcttgatggcttgcgccaccaggtaggcggcgccgcccacggccatcaggtacacggctttgtggtccttgatcgcttcgatggcggtcgggccgcgctcggatttgccgatcatgcccagcaggccggtttgctcgaggatctgacgggtgaacttgtccatccgcgtggcggtggtcgggcctgcagggccaaccacttcttcgcgtaccggatcaaccgggccgacgtagtagatgaagcggcccttgaggtccaccggcagggtttcgcccttgttcagcatctcgaccatgcgcttgtgcgcggcgtcgcggccggtgagcatcttgccgttgagcaacacggtttcgcccggtttccagctctgtacttcttccggggtcagggtgtcgaggttgacgcgacgggccgacgggccggcttcccagacgatttccgggtaggcgtccagcggtggcgcttccagcgacgccgggcccgaaccgtcgagcacgaagtgtgcatggcgggtggcggcgcagttggggatcatgcacaccggcagcgaggcggcgtgggtcgggtagtccatgatcttcacgtcgagcacggtggtcaggccgcccaggccctgggcgccgatgcccagttggttgaccttctcgaacagctccagacgcatctcttcgatacggttctgcgggccacgggctttcagctcgtggatgtcgatggattccatcaacacttccttggccattaccgcagctttctcggcggtgccgccgatgccgatgccgagcatgcccggcgggcaccagccggcgcccatggttggaacggtcttgagcacccagtcgacgatcgagtcggacgggttgagcatggccattttcgacttgttctcggagccgccacccttggctgccacgtccacttccacggtgttgcccgggacgatggagtagtgaatgaccgccggagtgttgtccttggtgtttttgcgcgcgcctgccgggtcggcgaggatcgatgcgcgcagcacgttttccggcaggttgtaggcctggcgcacgccctggttgatcatgtcgtccaggctcatggtggcgccgtcccagcgtacatccatgcccacgcgcacgaacacggtgacgatgccggtgtcctggcagatcgggcggtggccggtggcgcacatgcgtgagttgatcaggatctgggcgatggaatcacgggccgctggcgattcttcgcgcaggtaggcttcgtgcatggcctggatgaagtcaacggggtggtagtaggaaatgaattgcagggcgtcggcaacgctctgaatcaggtcgtcttgcttgatcacggtcatgagtcgcgctcctctataagggaacattcaataaaggtgggctcagtgttgcatcggtcggctgagcccacctttccaaggcacgccaagtggtgcaggcgcgacgctaaaaaggcgcggcagtataacccggcgcggtggccgatacacccgactatggtcaaactctgatgagtgtaaacacagggccaatgtgggagcgggcttgcccgcgaaggcggtgtgtcagtcaacttgaggagaactgataggctgctatcgcgggcaagcccgctcccacaaaaaagctgccggcgttatcgttggcgaacattcgcattgtctgagatttatatgcctgaattgcacgtcggcgaacgccactggtcggtctccaccggcagcaacctgttggatgccttgaatctggcgggcgtagcggtgcctttcagttgccgcgcggggagttgccatgcgtgcctggtgcggtgcgatggggaggttgacgataaacaaccggatgccttgagccctgcgcagcgtcagggcggctggcgtttggcgtgccagtgtgaagtcgtcgggaatgtgaaggttgaagcctttgatccacagcgtgacggcgtgcccgcacacgtggtgggcatcgattggctgacttcgaatgtgctgcgcctgcgtttgcaaccggaacgcggcctgcgctatcgcgccgggcagcatctggtgttgtgggcggggcaagtggcgcggccttattccttggcgagtttgcctcaggacgatgcatttctggagtttcatctcgattgtcgcttgcccggcgagttcagcaatgccgcgcggcagttggcgatcggtgactgcttgcggctgggtgaattacgtgggggagctctgcaatacgacccggactggcagacccgaccgttgtggttgatggcgtcgggcaccggtcttgggccgttgtggggcgtgttgcgcgaggcgctgcgtcaggatcatcaaggcgccatccgcgtgattcacctggcccatgatgctgagggccattatttggcaaaacccctggcgcagttggccgcgcagtatccgaacctgacggtggagctgtggacgacggctgagtcgacccaggcattggcgcaactgcggcttgtttcgcggcaaactctggccttactctgcgggcaccctgccagtgtcgaggcgttttccaaacgcttgttcctggcggggctgccgcgcaatcaactgctggctgacgtgttcctgccccgtggttgagcgctgacttttacagccgcgagattcaccatgaccgacgccatcctgcagctacgtgaacgcgggctgctgattttgcagctcaatcgccctgacaaaaagaatgccctgacccgcgccatgtacacgcaactggccgacgcgttggagcaggccgatgcggatgcggatatccgcgccgtgctgatccagggcagcagtgaatgtttcaccgccggcaatgatatcggtgacttcctcgaacagccgcccagtgacctggacagcccaccgtttcactttatgaaaagcctgctcaattgccgcaaaccggtgatcgccggtgtggcgggttcggcagtgggcattggcaccaccttgctgctgcattgcgacctggtgtacatcagccgtgatgcgcgcttgcgcatgccgttcgtcaacctggggctgtgcccggagtttggttccagcctgatcctgccgcgtttgttggggcatgcgaaggcggctgaattgttgttgctgggcgaagggtttaccggtgaacaggcggcgcagtgggggattgccactgaggctttgggcaatggtgaggcggctttggccaaggcgcgggaaatggccgagcgttttgaaagcctggcgccgggggccgtgcaggtgaccaagcaactgatgaaaagcgtggaccgtgagcagttgcgcaaggtgatcgaggaggagggggccttgtttgtccagcgtctgaaatcccccgaggcgattgcggcgttgtcggctttcatcacccggcgatagcggtgttttgattgagcgggcctcatcgcgggcaagcccggctcccacagtggcttgcctgtgatgaggcccacatggccaacagatcattcctgactgaaatgcaaaaagccccgccattcacatggcggggcttttgtttttcagcgtgtcacatcaaaccattgggtcgccaacgtgcaggattttcatgccgttggtgccgccgatggtgtggtagctgtcgcccttggtcaggatgacccagtcgcctttctccacaacgccgcgcttgatcagctcgtcgatggccgcctggctgacttcatgcggcggcagcgaggccgggtcaaacggcacggtgtacacgccacggaacatggccgcgcgggcctgggtttcgcggtgcggggagaacgcgtagatcggcaccgaagagcggatgcgcgacatgatcaacggcgtgtagccactttcggtcaaggcgatgatcgctttaacgcccgggaagtggttggcggtgtacatggccgccagggcgatgctctggtcgcagctttcgaactctttgccgatgcggtggctggaggtcttgctggtcgggtgcttttcggcgccgatgcagatacgcgccatggcttgcaccgcttccagcgggtacgggccggcagcactttcagccgagagcatcacggcgtcggtgtagtcgagcacggcgttggccacgtcggacacttcggcgcgggtcggcatcgggttctggatcatcgactccatcatctgggtcgccacgatcaccgctttgttgtggcggcgtgcgtgcaggatgatcttcttctgaatgccgatcagctcggcgtcaccgatttccacgcccaggtcgccacgggcaaccatcacggcgtcggaagccttgatcaggccgtcgagggtttcgtcatcggccaccgcttcggcacgttcgatcttcgccaccagccaggcagtgccgccggcttcgtcgcgcagttgacgggcatattccatgtcggcggcgtcgcgcgggaaggacacggcgaggtagtccacttccatttcggcggcgagcttgatgtcggccttgtctttttcagtcagcgccggggcggtcaagccaccgccacgacggttgatgcctttgtggtcggacagcgggccgccgatgatcacggtgcagtgcagctcggtcggggtggcggtgtcgacgcgcatcacgacgcggccatcgtccagcagcagttcgtcaccgacgccgcagtccttgaccaggtccgggtagtcgatacccacaacttgctggttgccttcggtcagcgggtggctggtggagaaggtgaacgtgtcaccgatcttcagctcgatgcgcttgttggcgaatttggcgatgcggattttcgggccttgcaggtcaccgagcagcgccacgaagcgaccgtgcttggcggccaggtcacgcaccagcttggcgcgagccttgtgctcgtccggggtgccgtgggagaagttcagacgggcaacgtccaaaccagccagaatcagctgttcgaggacttccggcgagttgctggccgggccaagggtggcgacgattttggtacgacggacggacatgcacagactcctgagttcaagcgctgaggaaggctactatgctctttcgttgtagtcattgttcgtttgcactacttatcgacgattggcttgtttttgttgcagatgaatcgaccaacatccttgaagattttcgacgaggggtcgatacactgcacaagacaggagaacccccatgcgtattttgctcgttgctgccctggccgtcagtgttgtcggctgtacccgttggtcgatggaccatcatttgaacaatgcgtaccgcgcctatggggtgggtgattgcgagcgtgtcaccctggagttgtcccaggtcgaccgtgaaagccgtacccgtcgttacgtgcagccggaggtctcaatgctgcgcgggcaatgcctggaacggcaaaaactgttcgtcgatgctgtgcaaacctatcaattcatcatcagccaatacccgtcgagtgagtacgcatatcgcgctcgcgccaggctggataccttgcagcagttggggcactaccccggcgccagcgctgcgcagccacgcccggcgtctttatgattatatttgtcattctatagctggcctgtcgccagtcttgggctattctttgaatattcgtttgtacaagtttctgttcgagcgaatgccaaacccgattcggcagccgtgcggcgatgcaaaggatgtgcgttgtcatgccgagatcagggagagtgagctattggcttattccgaatcactggcccggccaacatggccaatggatggcgacctcacatgtttaaccaccgacgaattgagcggcatcaattatcctgctttctgcaggttttcaatcgcctcactgacaagcctatcggctatctgggtaatgtctcggcagacgggctgatgttgatcagccagttgccgatgatggtcgatgcagagttcgaactgtgtttgaaaatccctgggccggaaggtgaaatccagaacattgacgtcacggcgacgtgcctgtggagccatgaagatatcaaccctcagcattatgactcggggttcagcgtggtgcaggcttgcgacgagtacgcgcatctgatcgcggccttgttgaattacttcagtttcgaccccttgcaggcatcagcctagcgatcaactggtatcggaccggttcggggggatactgcggccatagcccggtccccgctttagaatacgccggcttttttccagcccaggtagcgtgtaaccagttcggctcccaactgcgaaggtggagtgtccactaccgacaatccatgtgcgttcagccggtcatgcagtgcgttccgcgcattgaggtagtcgaccgtgccgctgtaggccagggcctcgggcaacgtctgcacgggggcctggcgcaattgatcaaggacctcttcccgcaggctggccaccaggacccggtgttgccggctgatacgcttgaccgctgtcatcagggcctcatcgtcgtcatccagaagattagtcaccacgatcaccagcgcacgacgtttttgacgcgccaacagttggcttgcggcggcttcatagtcggctgttcgacgggttgtatcgaggtcataaaccgtattgagcagcaagttcaattggccactgcccttgaccggcgccaggtagcgtggctgatcgccagcgaacgtgcacaggcccacggcatcgccttggcgtaacgccacataactgagtagcaggcaggcgttgagcgcatggtcgaagtgcgacagctcgtcatcctggctgcgcatgcgccggccacaatcaagcatgaacacgatttgctggtcacgttcatcctggtattcccgggcgatgggcgtgcgttggcgtgcagtggctttccagtcgatctggcgcaagctgtcgccttcacgaaattcgcgcagttgatggaactccaggcccagccccctgcgctggcgttgtcgtacgcccagttggctcagccagttatccacgcccagaagttgtgcaccgtagagttttgcgaaatccgggtagacgcgtgtggcgtcacccacgtgcacatagcttcgtgccgaccacaatccaaatgggctcggaagctgaatctcacaatggctgaacctgaagtgcccacgtcgcagagggcgcaggcggtagcccatttcgctgcgttctccagggcgcaactcaatggtctggggcaggttttccaggctcaggccatctggaacgtgatcgaacaccgttaccctcatcggttgcgagtagctgtgcgtcagggtcaggcgtacttcaccccagcggcccaatgccaggctcccgggcatttgccgttgcacctgtacagaggggcggcggcgcaaacgaatggcgtccaacaccgccatcagtagtagcgccagcagcaggccccaggcgatcgagtgcagcgtgcccggtacgttgagctgcaaggctacggcgccgccgagcagggtattcaggcccagcagcacgctcagccagctcaacaacagtcccgtcggcttcatgggcgggtcactgccggggagccgcaatctgatcaagcatttgcttgagcacctgatctacctccaggccgtcgatgtccagctccggcgcaatgcgtacccgatgacgcaataccgccagcgcgcagcccttgatgtcatcgggggtgacaaattcgcccccgcgcaacagcgctcgcgcccgggcaccgcggaccagggcgatggacgctcgtggcccggcgccgatagccaggccgggccaggtgcgcgtggcccgcgccaggcgtactgcgtagtcgagcacttgttcatccagcgccagcgcactggcgacctgctgcagttgcagtacgtcttctgcctgcagcacggtgcgcagcggctgtacatccagcatgtcggccctggatgaacgggtgacttcgcgcaccatgtccagctcctgctgtgcatcggggtaatccatccgcaccttgagcatgaagcggtccaactcggcctcaggcaaggggtaggtgccttcctgttcaattgggttctgggtggccagcaccatgaacggttggccgatcggcagtgcctcgccctcaagagttacctggcgctcctgcatggcttcaagcaaggcggcttgagtctttgccggggcacggttgatttcatcggccagcagcaggtgggtgaacagaggccccttgcgcagcttgaactgttcagtgtgcaggtcgtatacggcatggccggtcacgtcgctgggcatcaggtccggtgtgaactgaatacgtgcgaaatcgcctccaaagcaacgggccaaagcacgtaccagtaacgtcttgcccaagcctggtacgccctccagcaacacatgccctccggcaatcaatgcagtgagcacgtcgtcaatcacctggtcctggccaatcaccgccttgcgtagttcaacgcgcaaggcttgtgcttgctggctggcttgcacaagcgcttcgctggttggaagggtggctgctggaaaatcgctcatagggcattcctgagggtctgaaggcacgccacctgacggctgaaatcggcgctgctgagccgtttttccgggagtgggccaagggcctggctgatgacattggagggttggcgcgtcatgcgttcgagcacctgacactgctcggtggtgcccagatattcaaaacccggatgacgccgccttgcagcgtgctggatatcacgttgcaaggcgcgcagcagaggggcttggccactgcgccgcagcaggaagtcggcgctggcctgtaaatgttcctgtaattgccgacgagccttggacgcaggtgcctggatcgggccctggcgcatgcccgctcgccaaagtgccaaggcaattagtgctgcgagagccaccagagcttgcgggaagttccgtagcaatagcgtcatcaggttgtccacgtcgctattgaacagcactgttacgtgcgtgccctggttgaggtaccacaacagccaggcattatcgtgcttgccgatgtttgaggttttccacaaatcgctgtcggttataaccgttacgatgccttgccctagggcgcgctgcatcagatgactggatttggcactgttggcggaaaactgtgagaggtgcttgggatcgacgaggttgaagtcggtatcgaagctgaaataggccggggtggtttcattgtcgacgtagagtttggtcaggtccggcgttctctttttgcgcggggaggctggctcctcgtaggtgtcgctcaaggtttggtggatatccactcggtcgagcaacaggtcgccgcttttgccggtttcttcatcccacaacgcttcggcgaccagcagcaggtggccgccggattttgcccagttcactagctggtccacctggcgcggggtcatttggctgcgttcgcccagcagcagcaggctgtttcccctgggggaaaggtcggcaagccgttcgaggccattggcctgttcaacggtgagcccttgctggcgcaggaaatattcagccgccatataagggtttgcccggacctgaggagatggcccgcgatctaccacctcgtcataggggattgccttttgccagaaatagaaggcagcggctcccagcaggcatgcgaacagcaaccccgcccaggccagcggccggttcatcgggcggcccctgaattgaacaacgcacgccagtctctgcacagctgttgctgaacgggggctggcggcagccggtgaccataggcaaggttttgccagtgacgggtcagctcatcgctgaattccagtatctgggggtgctgcaattgatgtacgcgttccaggacctgaccttctgtgtcggcacttttcagcggcaggttgaaatcgtgcagcaagcggctgagcaggccacggtataaaagaccgagggcctctcgtggtcgggtatgccagagtttttcggcggtggtggcgatgtcttcgggcaaggtttcaatacccagctccagaccaaacaattgcgtgggggcggatttttcagccttgggcttgcgcccttcgcgccggctgacaaaggcttgcagccaactgcggtagtaccaggcaagcaggacgagagcaccgatcaacaagctccacagcagtatttccaggccctgtgcaacatgtttgaaggtattgctgttgaaattatccagcagcgcccgcagccacgccggcagtttgccgtcgctatgggctttgcttgcaggggctggtttctcttcgccgaaacggtagcgggtgacggtttccgggtttttaaaaggtggtttttccaattgcgccttgatcgactggctggccgcttgggtgctcagtggtttgtggccattagtctggtccgcatgggccggggggctggtttgtaccaggatcagcccgaccgccaacagcaagcctgtcgcaacgctgctcaaacgctggcgcagccggcggaacactaactccaggtcccaggcctccagcacagtgcggcggttgagatagaggctgaagccgcaggccacgtagacaggttcccaaaacaccagcaccaacgcatagaaagcattgctcagatgttccagccataacccttgcgaaccgctggcgagtgccagccgttgccagtcccaatccagctcaagctgttcaggaatgaaaagataaaacagtgccatgcagccaagccacaggccgatttccacgtgtacacccaggagggtcagccagcgtgcggcgccggcgttatgttgcaacaacacgcccaggcggtgctggcgtgcctgcccgtccagcccttcaagctggctgaccggcatcaggaaactgcggctcaggctgagccgtcgccatgtcaggctggccagcagttggcttttgagcaggcgcggccaatgacgtattgcctgtttggtgctgggtgtctcgccaaacaaggctttggacaggatgtacagcggcaagcggtcgaaggctggcttgaaccaccagaacagaaagagtgcggttgatgggtgctcccagagcaacagggtaagcaaggcaaataccggcaggctcaccagcgcccaggtactcatcagcagcaggcgatgctcccgggccatgagtatgccaaggtccatggcttcccaggctgtacgggggcgaatcacgacgctcgcatcactcagtcgcatggagagcccgcccggcgaaaatcaggtaagcggccaccagcagccacagtgcggcgccgaccaggtatttgatccacggggccaccgtcgtggtggatgaccagtacgcttcgataaacgcggcgatcagcaggaataccattacgccacacagcatctgtacgctcttgcgtgccgccaatctcagggattcgctgcgtgtcagggggcccggagcaatcaacgcccagcccagttgcaagcccgccgctccggccagggcgattgcgctcagttcgaaagccccgtggccgatcacaaacgaccagaaggtctggccatagcctatttcggtaaggtggccggagactgcaccgattatcaaaccgttgaaaatcagaaaaaacacgctgcccagacccaacagcaaaccagcggcaaaggtctggaaggcgataccggtgttgtgcatcacgtagtagccaaacatcatccagtcttcactggaggcccggtcggcagcccggcccaggcgactggcatcggggtcgtacatgctttgcatctcggcgacctgttgcgggctgatgatgctgtagatgaggtcgggaaacaggtagaccagcacggctatgcccgccaggctgccaaagaacagcgcgctggcgatcgccacaaagcgccactgctcgcgtaccagccgagggaaaccggccagcaggaagctcaatacattcgcggccaattggctgcgatggcgatacaactgttggtggccgcgcaaggcaagttgttgcagagggtccaccagataactgctgtagccccggtcctgtgccatcgcgaggtgctggcacaaacgtcggtattggcgggggaaatcggccatgtcgcttgccttggttttgccttgctccaactgtttcagttgttctgcaaaggcctgccattcaggttggtgacggctttcgaacaggctctgtttcatgtcggccccagtaaaccacgggccacgccgttgaggtgttctgtcgcccgtgcgggagatacctgcaggggagcggcgaggatggcggccagttcctgtacccgttcgctggatagttcgccttggcgttcggcgaagccgaggatagcgcgctgctcactcagctctagggtgaatggcaggcgcagcgcaggcgcttggggaatagcggggcgggcaagcggtagcgtttggtaaatcaccagggtcccggcggccaaatcgcccagacgcttgaagtgagggtgttgcaggcaactgatggcgccgatgaagtaaccgaacggcaacatgtcgacaaagcgcagcaggttccgggtcagcgaagcggaccagccaacgggggtgccgtcgtcttgaatgacccgcaggcccatgacttgcttgccgggtgaacggccctgattgagcacttcgaacagcaccatgtaccaccaactgaccaggaacagcagcaatgaacccaggccaatccctacattgcccagcagggccaggggtaccagcaggatgcccatgatcaacccgcgcacgcccagatcgaaagcgaaggccagcatgcgtggcggcaggccggcagggcgcaagggcagatcgatgccctccggggtttcgatctggtagcaagtgtccaaaggagctgatggcattgcgatccttggcagtgcgaagcggttgagagactcggatgctagcagtgtcaacggtggaagcaaccactcaaggttttgctggatgtttgtacagtgcaggtattgctggccccgaacgccacgcagcgcctagactttgtcggtcttcaacacaggaacagcccgtgaccaccattttctggtacgactatgaaaccaccggcatcaacccgcgcagcgatcgcccgctgcaggtcgccggtattcgtacggacctcgaacttaacgagatcgctgcgccggtcaacctgtattgcctgcccggcgacgatatcctgcctcatccggccgcgtgtgcaatcactggcattacccctgccgtcctggcggataaaggcctgagcgaagccgacttcatgacccgggtgcacgccgagctggccgcacccggcacctgctgcgccggttacaacacgctgcgatttgacgatgagatgacgcggtacagcctgtatcgcaacttttttgacccctacgctcgcgagtggcagggcggcaacagccgctgggatctgatcgatgtagtgcgcaccgcgtatgcgctgcgcccggagggcatcgtctggcctgagcaggatgggcgcgtcaccctcaagctcgaacgcttgaccgaggccaacggcatcgatcatggccaggcccacgatgcgctgtctgacgtgcgcgcgaccatcgccctggcccgtctggtacgtgagaaacagcccaagctatatgagtggttgtttcaattgcgcagcaagcaacgggtcatggaccaggtgcgtctgctgcaacccatggtacatatttccggacgctttgctgccgagcgtcattatctgggagtggtactgccgctggcctggcatccgcgcaatcgcaatgcgttgatcgtctgcgacctggggctggaccctcaagggttgctggatctcgacgccgataccttgcgtcagcgcctttacacgcgccgtgacgatttggcggaaggtgagctgcccgtgccgctcaagttattgcatatcaaccgttgcccggtggttgccccattgaatgtcttgcgggcgcaagactgtgagcgactgcacttggatatgggcacctgccaggcgcgggcgctgcgactaactgacgcacaggaagtttggcgtgacaagttggcggccatttatgccgaggaagattttacgccgagtgccgacccggagcagcagctctatgacggttttattggcgaccgcgaccgtcgtttatgcgaacaagtccgcacggctgaacctgtggatcttgcacgccagcagtggccatttgatgatcatcggttgcccgaattattatttcgctaccgtgcacgcaactttcctgacaccttgaacaacgaggaacaacaacgctggaaactgttctgccagcaacgtttgtcgaatccggagtacggggcgcccaatactctcgaggcatttaagctggcgcgtgttgagttggctgctagtgctacatcgtttcagtgtcaggtgctggatcagtggcaggaatatgccgacactttagccgcccgtctggatctgtagtcgcgtagttttagaatattcagacaataaaaaacgccagcgagctggcgtttttttatgtgcagcgtatcaggcaagcgcctggcgaagcttagcccagcagggtagcccagccttcaaccacgtcgccgccccacttggctttccactctttcagtgtcttgtggttgccacctttggtttcaatcacttcgccgttatgcgggttcttgtattgcttaaccttgcgggcacgcttggtgccggtagtttttacagcgccgcgcggtgctttaactttcgactctggatccagcagtgcgatgatgtcacgcagggatttggagtattcacccatcagagcgcgcagtttgccttcgaattcaagctcggtttgcagcttgtcgtcttgggacagattcttcaaacgggcttgcagctctttgatagcttcttcggtggcgcggtattcgttgatcagagacatgtggactaccttatgtagagcgctgattgacagtggagtggctcaataatagtcaggcaatttccccaagtaaacatttagggtgcatttatgtgaattactttgaaagtttttagccgggctatgcaatcgagttaattagtaggtggtaggcctaaagattattccgcttgttttttgataactgacccgtcgtaccgttttacgctgatctaagggtggtaaaaccttacgctattaaggggtgaaggcaggccgggatgcagaacacgcctgaatcaatactgcagtttttctgcgtaatcgctagaatggcgacctttgcgaagttctggagtttccccctaatgcgcacttttcggctggtgattgcttgcccggaccgggttggcatcgttgccaaagtcagtaactttctggcttcccataacggttggatcaccgaggcgagccatcactcggacgatctcagcggttggtttttcatgcgtcacgaaattcgtgccgacacgctgcctttcggtcttgaagcctttcgcgaggcatttgcgccaatcgccgaagagttttcgatgacttggcacattaccgacaccgagcagaaaaaacgcgtggtgctgatggccagccgtgagtcccattgcctggccgacttgctgcaccgctggcacagtgatgagctcgattgcgagatcgcgtgcgtgatctccaaccacgacgatctgcgcagcatggtcgagtggcatggcattccttactaccacgtgccggtcaacccgcaggacaaggagccggcgttcgccgaagtctcccgcctggtcaagcagcacgaggccgacgtggtggtgctggcgcgctacatgcagatcctgccgccggaactgtgccgcgaatacgctggcaaggtgatcaacattcaccacagcttcctgccatcgttcatcggcgccaagccgtaccaccaggcgtccctgcgtggcgtgaagctgattggtgcaacctgccactacgtcaccgaagagctggacgccggcccgatcatcgagcaagacgtggtgcgtgtcagccacagtgacagtattgaagacatggtgcggttcggccgtgacgtcgagaagatggttctggcccgtggcctgcgttaccacctggaagaccgcgtgctggtacatggcaacaaaaccgtggtgttctgatacccgcgcttttgattgatcaaaaaagggcctgggcgttaaatcgtcccaggccctttttcattgttgctgttgaggattgaacgatgagcgacccactggacaaagccacctccaaaccacccgcgacgctgggggagggctgtttgagccggtttgacccggatgacctggacgctgaagacggcaccgagtttcccggtgccgccgaactgtgggagcaggagaaggccaagcccgagcctacagctgattaacgctggcccctggtcagatccggaaactgcccaccaactgcttcaagcgcgatgcttgttgttccaggtcggtgcaggcccgcaaggttgcatgcaggttttccacaccttcctgattgagggtgttgatctcggtgatgtccatgttgatcgactccaccacggaagtctgttcctcggtagcggtggcgaccgactgattcatgccgtcaatctcgccaatacgttgggtcacgctgttcaagcgctcacccgccaggttggcaatctctacactgtccaggctgtggcgctggctttcactcatggtgctgacagattcgcgggcgccgacttgcagttcctcgatcatcttctgcacttgctgcgccgattcctgagtgcgatgggccaggttgcggacctcatcggccactaccgcaaacccgcgcccggcttcaccggcacgcgcggcttcgattgcagcgttcagggccagcaggttggtctgctgggagatgctggtgatcacctcaagaatttgcccgatattcacggtcttgctattgagcgcttcgatattggtgctggaagcgctgatcatcccggacagctggttcatggccttgatattgcgctccaccacctgctggccgtcttgcgccagttgccgtgcgtcgctggcctgatgggaagcttgcgctgcattgcgtgcgatttcctgggcggcggcccccagttcgttgatcgcggcggcgacgctgttggtacggttggcttgctcgtcggagttgaccatcgatgagttggacgcgctgaccacgcgcagggcaacttcgttgacctgctgagtggccgaggatacttcgcggatcgacgtatgaatcctctcaacgaagcggttgaaagcattgcctagggtgccgaattcgtcgtggttctggatggtcaagcggcgggtcaggtcaccttcgccatcggcgatgtcctgcatggcgcgggtcatcaggtgcaggggttgcaacagcacgcggatcagcatgcccagcaacgcgatgatgatgacgacggcaatgacagtggctatcaccgccgaggtgcggaatttgctgagcatggcgaaggatttgtctttatccaccgaaatgcccaggtaccattttaccgacggcaggcctttgatcggggtaaaggtcacgatgttgtctttgccgttggcttcgacttcgctgaagtcaccgctgattgtcggtgtattttttgggtacacgtccgccagggtcttcatcaccagggttttgtccgggtgcaccagcactttgccatcggcactgaccaaaaaggcatagcccataccgccaaagttcagcgcgccgatattatccaccagggtttgcaggctcaggtcgccacctaccacgccgatgctctggccggctttggcgctgggcgtggcgatggaaataatcaactgcccggtggctgcgtcgatgtagggttcagtcagcgttgagccgttgctgctctgggcgcctgtataccaggggcgaacccgggggtcgaagccgtccggcatcttggtatcggggcggatggtgaaggcgcctttgctgtcgcccacgtaggttgccatgaacgaggttgtcagggctttctgttccagcagggttgcaaccgctgccggttccgggttgacggcgatgttttgtgccgcgttttccaccagggcaatacgcccggtgagccaggtttgaatattgctggcggtgacatcccccatttcatgcaggtagttgttgaggtcgtcgcgaattgcgttgcgttgcaggtagtcgttgtagagggtaaacagtgcgaaggcggcgatgacgataagggaggctgcaagcaggattttgtggctgaagcgcagatttttattcatggcttgtagggtccgctaaggtcttaatatccgaagcgcgtccttatgggaggcgcaaaatggcagcgttaaaaaaaggtgtgatatttctcgttagtccctgtaggagctatctgacctatttttagactttgtgggtctcacatgtgtctatatcgacctggcgatactaaagattaaccataggtgacgaaatgcctgactcttcgcaactcctaatcggcgcgggcctggatggccaacccatcgctcaggccatgcgcctggccaaccgtcacgggttgattgccggcgccaccggcacaggcaagaccgtcacgttgcagcgcctggcggaagccttcagtgatgcgggcgtggccgtgtttgccgccgacatcaagggcgacctgtgcggcctgggcgctgccgccaaccctcaaggcaaggtggccgagcgcattgcgggcatgcccttccttaattacacggcgaaggcttatccggtcacgttgtgggatatccacgggcagtccggtcatccgttgcgcaccaccatcagcgagatgggcccgttattactcggcgcgttgctcgagctcaccgacagccagcaatcggcgctctacgcgacattcaaggtggcagaccgcgagggcctgttgctgctggacctcaaggacctcaaggccttgctcaatcacctgcgttatcacccggagctgctgggcgacgacgctgcgctgatgaccaccggctctagccaggcattgctcaggcgtctggccgtgctggaacagcagggcgccgaagcgctgtttggtgaaccggctctgcaacttgaagatattttgcagcccgccggcgatggtcgcgggcgcatccatttgttggacgccagccgtcttgtgcatgaggcgcccaaagtctacgcgacgttcctgttgtggctgctggcagagctgttcgagcaattgccggagcgtggcgatgccgacaagccgctgctggcactgtttttcgacgaagcgcatttgttgttcgcggatacgcccaaggcattgcaggaccgtctggagcaagtggtgcgtttgatccgctccaaaggggtgggtgtgtattttgtcactcaatccccgggcgatttacctgacacagtattggcgcaactgggtctgcgtattcagcacggcttgcgtgctttcacgactaaagaacagaagtccctgcgggctgtggcggacggtttccgagccaatccggccttcgatacgctgtctgtgctgacggagctgggcacgggtgaggccttggtcggtaccttgcaggaaaaaggcacaccggaagtcgtccagcgcgtcctggttgcgcctccgcagtcgcggatcgggccactcagcgaagccgagcgtgcggcattgatcgccagttcgccgttgctgggtcggtatgacaagccgattgaccgcgagtcggcctacgaagtactcatggcgcgtaaggatcttgggacgaccgaggaggccaagccgagcgccgaagagccgagtttcactgataaggccggagcgtttttggggactacggcaggcaaggcgctcaaatcggccatgcagcaggccgccaaccaaatgggccgtcagttggtgcgtggccttttgggctcgttgctgggcggtagcaagcgcaagtgagggatcagggtttgggcctggcgtgggcggccaaccgctccagtgctgcgcgcaagcccggatcgctgatcccgtcggccgttgcctggatggtctcggcggcgttttccgagaggtccatcgtatgtcccgccgcgccttgcagcacggcgggcggctgaaccttgaactggatacgcatcaggctggcgaattcatcaaacagcattaactggcgctgcaagcgtttttgctgatagcgcaggcgggtcgcccagtggccgtcggtgacaattaacagcaaattgccttcacgccaggacgccacacggcaatgttcccgcgcggcgggttgcaattggctgtcgagcaggcgctgcaaatggcccaggcgttgcgcgtggccgaagatggcttttaatggcttggcttcgcgaagcaacacgctgggcgcgcgggctgtatgtgggcgaaatgccatgtttagacaccttaagtaacagagccgccatcttagcagaaagcgcccgcgtgcccccgggcaaagcgctgaccgggctttgcccggtaaatcaataggtaacttctgcgcttgatgggttgaagttccggtaaaagcccttattttaaacaggccctctcacagcaccatgccagcatcggggaacaacgccactttcctcacccacgaatccgggtagaatgcgcgttcgcatgcggccgtgagggctgctcgggccactcacggtgcgccctccatccctatgtgtggaagaacctgccgatatgtttgcgcctttgttaaagaaactttttggaagcaagaatgagcgcgaagttaaacgcatgctcaagacggtgcagctggtcaatgctttcgaagagcagatggttgccctttcggacgagcaattgcgcgccaagacccaagagttcaaggcccgcatagccaaaggtgaaaccctcgacaagctgcttcccgaagcctttgcggtcgcccgtgaagccggtaagcgtgtcatgggcatgcgccacttcgacgttcagttgatcggcggcatgaccttgcatgaaggcatgattgccgaaatgcgtaccggtgaaggcaagaccctggtggcaaccctgggcgtttacctcaacgcactgtccggcaagggcgtgcacgttgtgacggtgaacgactacctggctcgccgggacgccaactggatgcgcccgctctatgaattcctcggcctgaccgtcggcgtggtaacgccgttccagccgccggaagaaaagcgtgccgcctacgctgccgacatcacctacggcaccaacaacgaattcggtttcgactacctgcgcgacaacatggcgttcagcatggaagaaaaattccagcgcgaactcaactttgccgtgatcgacgaagtcgactccatcctcatcgacgaagctcgtaccccgctgatcatctccggccaggccgaagacagctcgcgtctgtacaccgaaatcaacaaactgattccgcgcctgacccagcatattgaagaagttgaaggcgtggtgaccaaagaaggtcacttcaccatcgacgagaagacccgtcaggtcgagttcaacgaagccggccaccagttcgtcgaagagatgctgacccagatcggcgagctggccgaaggcgaaagcctgtactcggcacacaatctgggcctgttgacccacgtgtatgccggcctgcgcgcccacaagctgttccaccgcaacgttgaatacattgtgcaggacggccaggttgtgctggtcgacgaacacaccggtcgtaccatgccgggtcgtcgtctgtccgaaggcttgcaccaggccatcgaagcgaaggaacacctcaacatccaggccgaaagccagacgttggcgtccaccaccttccagaactacttccgtctgtacaacaaactgtccggcatgaccggtacggccgacaccgaagcgttcgaattccaccagatctacagcctggccgtgatggtgattccaccgaacaagccactggcacgtaaagatttcaacgacctggtgttcctgacggccgaagagaaatacgcggcaatcatcaacgacatcaaggacggcatggcccagggccgtccgatcctggtgggtactgccaccatcgagacttccgagcacgtgtccaacctgcttaacaaggaaggcatcgagcacaaggttctgaacgccaagttccacgaaaaagaagccgagatcatcgctcaggccggtcgcccaggcgcgctgaccattgccaccaacatggccggtcgtggtaccgacatcctgttgggcggtaactgggaagtggaagtcgcggcgctggaaaatccgagccccgagcaaatcgcccagatcaaggctgactggcagaaacgccaccaggccgttctggaatccggtggcctgcaggtgatcgcgtccgagcgtcatgaatcgcgtcgtatcgacaaccaactgcgtggtcgtgccggccgtcagggtgacgccggttccagccgtttctacctgtccctggaagatagcctgatgcgcatcttcgcctctgaccgggtgaagaacttcatgaaggccttgggcatgcagtccggtgaagcaatcgagcaccgcatggtgaccaacgccatcgagaaggcgcagcgcaaggttgaaggccgcaacttcgacattcgcaagcaactgctcgagttcgatgacgtcaacaacgaacagcgtaaagtgatctatcacatgcgtaacacgttgctggccgccgacaacattggcgagaccatcgccgatttccgtcaggacgtgctcaacgccaccgtcagcgcacacattccgccacagtccctgccagagcagtgggatgttgccggtctggaagcggctttgaagagcgacttcggtgtggacttgccggttcagcaatggctggacgaagacgaccacctgtacgaagagacgctgcgcgagaagctgatgacggagctgctggccgcgtacaacgaaaaagaagagcaggcgagtgccgaagcactgcgcaccttcgagaaacaaatcgtactgcgcgtgctggacgacctgtggaaagaccacctgtcgaccatggaccacttgcgtcacggtatccacttgcgtggctacgcccagaagaacccgaagcaagagtacaagcgcgagtcgttcacgctgttctccgagctgctggattcgatcaagcgcgattcgattcgcgtgctttcccacgttcaggtgcgtcgcgaagatccgatcgaggaagaagctcgcctgcgtcaggaagccgaagcactggctgcgcgcatgcagttccagcacgacgaagcgccgggccttgaggcgccggaaatccttggcgaagaggtcgatgtggccctggcccagacgccggttcgcaacgatcagaagctgggccgcaacgaattgtgctggtgcggttcgggcaagaagttcaaacactgccacggcgaaatcaactaagatttttgcctgacgctgcaacaccctgcgccgcgaccggcctttgccgtcgcggcgttttgccattaatttcaccgtcgctcacgacggtacagacatcacctcatttttaaggagcgcattcatggctgttggtcttggtcctttgcccactttgcacccggtcgccggttttgaactcggtatcgcttcggccggcatcaagcgcccggggcgtaaagatgtggtggtgatgcgctgtgccgaaggctcgaccgtcgccggtgtgttcacccttaatgcgttctgcgcagcgccggtgatcctggccaagcagcgcgtggccggtaacatccgttacctgctgaccaacaccggcaacgctaacgccggtaccggcgagccgggccttgtagcggctgcgcgcacttgcgccaagctggcccagattgccggggttgatgccagccaggtgctgccgtactccaccggcgtgatcggcgagccgctgcccgtcgagaaaatcgaaggcgccctgcaagctgcgctggatgacctgtctgtggataactgggcggcggcggccactggcatcatgaccaccgacaccctgcccaaaggcgcgagccgtcggttcgtgcacgatggggtgaccgtcaccgtgaccggcatcagcaagggcgcgggcatgatccgcccgaacatggccaccatgctcggctacatcgccactgacgccaaagtctcccgcgacgtactgcacagcctgatcctggacggcgccaacaagtcgttcaaccgcatcaccatcgatggcgacacctcgaccaacgactgctgcatgctgatcgccaccggccaggccaacctgccggaaatcaccgaggccagcggtccgttgttcgccgcgttgaagcaggcggtatttgaagtgtgcatggacgtggcccaggccatcgtgcgtgacggcgaaggcgcgaccaagttcgtcaccgttgaagtgaacggcggcggcaatcaccaggagtgtctggacgtgggctacaccgtggcgcactcgccgctgatcaagactgcgctgttcgcctcggaccccaactggggccgtattctcgccgccgtaggccgtgccggtgtgccggacctggacgtgagcaagatcgacgtgttcctcggcgatgtgtgcattgccagccgtggcgcccgtgccgagtcctacaccgaagcccagggttcggccgtgatgcagcaggaagaaatcaccatccgtatcgagctgggccgtggtgcgtgcagcgaaaccatctggaccaccgacctgtcccacgagtacgtgaagatcaacgcggaataccgtacctgataacacagaggaaaagcgcggtgaaacgagtgcatgtagcagcagcggtgatccgcggcgtcgacggcaggattctgctggcgcgccgcgccgatacacagcaccagggcggcctgtgggagtttcccggcggcaaggtggaggccgatgagtcggtcgccgccgcgctgtcgcgcgagttgcaggaagaactgggcattcaggtcaccacggcccggccgctgatcaaggtgcagcatgactacccggacaaacaggtgttgctggacgtgtgggaagtctcggcctttaccggcgagcctcatggtgccgaagggcagccgctggaatgggtggcgccgcgggacttgatcaactatgagttcccggcggcgaatgcgccgattgtggcggccgcgcgtttgccggccgaatacctgatcacgcctggcgaactggaaaccccgaccctgttgcgcggaatccagaaagccattgccggcggcatcaagctggttcaactgcgcgcgccgaatggttacgaccccaaataccgtgacttggcggtggacgcggtgggcctgtgtgccggcaaggcgcaattgatgctcaaggggccgtttgaatggctgggggattttcctgcagctggctggcacatgacttcggcacaattgcgtaaatacgcgagcaagggccgaccgttgccgaaggatcgttggctggcggcgtcgtgccataacgctgaagagctggcgctggcagaaatgatggacgtggattttgtcacgctgtcgccggtgcagccgacgcaaacccatcctgacgggcaaccgctgggttgggaaatggccgctcagttgatccgtgggttcagcaaaccggtgtttctgttgggtggggttgggccggccgagcgggacaaggcttgggaggctggggctcagggtgtggccgggattcgggcgttctggccagaggtttgatgcaactttgatggcctcatcgcaggcaagccagctcccacctttgaatgtgttcacaggtcgaaggtgggagctggcttgcctacgatgaggccctatcaatcactaaaaaacatcaatggggtttggccgccgcctgccacaacacttccgcaaccccttggcgccgggcaatcacccgtgccgccacaaacaacaaatccgacaaccgattgatatacgaaagccccacgccttccagcggctccaccgcattcaactgctgacaccgccgctccgcactgcgcgccaggctgcggcacacatgggcctgggcgatcaacgccgagccgccgggcaggatgaagttctccagcggccccacttcctcgttccagcggtcgatcgccgcttccagccggtccacttccgccgcattcaaagccttgtacaccggcatcgccagctcaccgcccaggtcaaacaaacgatgctggcagggcgtaagcacttcgatcacgtccttcagttccggatgcttgccgctttgttcttccaggttggccagcagcaatcccaactggctgttcagcgtatccacttcaccgatagcctcaacgcgcgggtgatccttgggcacgcgacggccgtcgcccaggcccgtctcgcctttgtcgccggtacgtgtgtagatcttcgacaggcgaaagcccatggtcattgctccagtcgggtgagttcgtagggtggcagttggctgccggccaagggcaggcgcagggtaaagcaggtgccctggcccggcgtggagtgcacttccatctggcccttgtggttgttggtgatgatgaagtacgacactgacagcccgagcccggtgccctggccgatttccttggtggtgaagaacggctcgaaggtgcgcttgcgtacgttctcactcatgccaatgccgttgtcttccacctggatctcggcccacggcgggttcaggcgagtacgcaggataatacgccccggctcgctgtcgtcttcacgctggtgaatggcctgggcggcgtttttcagcaggttgagcagtacctgttccaactcgttggcggtgccgggcacggggcccagttgcgggtcgaattgacggatgattgcctggcccttgaagtcgaagccgatggtcaggtcgaagtcgttgccggcaatgtctacggcctgatcgatcaatgcgggcaaatcgcagggcgccatctggcgattgctgcggcggctgaagctgagcatgtgggtgacgattttcgctgcccgcgcgccagcctgttgaatgccgtcgagcaattgcggcacttcgcggctttgcaggtaacggttcacggtttccaactcgatgcccgcctgttcggcgtgctccaggtttttgggcaagtcgggagacaggcggcggcgaatgttctgcacgttgtgcagaatcgcccccagcgggttgttgatttcgtgggccatgcccgctgcgaggccgccgacagacaacattttctccgactgcaccatcatttcttccagggacaggcgttgggtgatgtcgtcgatacggatcactacgccacgcccggcgccgcccatcagcgggtaaaaggtgagggcgtaatgcttggcctcgtcatccttgacccacgtgacacgctcgatccgctctacgctgtgttgttccaccgtggccttgatttgcggcaggtagggcttgagcggctggaacgcgaggaagatcggctggttcagcgcttcatccaggcgcgtgccggaaagcgcgctggcttcctggttccactgagtgacgtagagctgttcgtccagggcgatcagcgccgagggcatggagtcgatgatgctgttcaggtagttctggaacccggtcagttttttctcgatcttgctgcgaacctgtacttccagttccagcttgcggttggtgtggcgggtttcttcggccaggccctgagcctggtcataagcggcctgggagtcgtcgcgcgcgcgtttgagctgctgctcacgggcttcgatgcgcgacaacatggtgttgaaggcttcagccaggctgccgatttcatcatggttgccgcggcgggcgcgcagggcgtagttctcttcgcgggtcacctggcgtgacagttcctcgagttcgtggatcgggcgggtgatcaggcgtttgatctgccgggcgatgatcaaccacagcagcacactgaaaatcaggatgcccaggctggcggtcagggtgccggtgtagaacgccaccggcaactcgctgctcgccaccaggagcaggtgcccggaaggttggccggcgcggggcagcgtgatgacctgattgctgcgaaactcggtgacccgccaggcctcaatgtgccggtagttatccggcaggtgcagacggttgccgtgttgcatctgcgccaggcggttgccgtcgccgtcgtacagcgctgcggcgcgtagcggtgagtagctggtcagctcgttaagcaatgcgtcggccttggccggcgactcaatggcttcggcggccagcgacgggttggaaaccaggcggccaatggcctgcaaggcctgcggcgccatactttcctgggaaatccagtaggcggcactgataaacgtcaggttggcgaccagcaacacggtggtcaacaacaccagcagagcggccagcagtttctgccctaccggtagattttctagacgctggcgcagtggcatcaggggtttcccaggtgatagacaggtaggcagggtagcgcgtgcctcagtcgctggccaatcggcgtgcagccaagaaggcgatcagccgtgcctgtacttgttgcaagtgggggagaaccaattgatggcgtgccgccgcctggcaagcgtagccgagcaggtagctgatttcggtgcgccgggcgttggccacgtcctgatacatggaggaatagttggcggcagtggcctggatcacccgttcaacttcgctgtgcaaagcgtcggccgccgccggctggccgcaacattcgagcaactcggccaactcggcgcacagggtggcgacttcacactgatgggcctgcaagccgccgttgcggcattgatacagcaccgtcagcgggttgattgcgcaattgagcgccagcttgcgccacaggcgcgtgagaatgtcggtgctccattcgtgaggtatgccggccgcctgcaaatcgctcagccagagtggcggggcagggtgggcggcatcgccgagccaggtgtagccatgcccggcaaataccacgcgccaatcgccgtcgcggaaggcgccttcggtgctggacgcaaagatgcaacgcgccaggggcaactgcgcagcgacggcgtcctggctgccgaggccgttttgcagcaggatcaactcggcgtccggcgccagccgatgctgcaactgtgcgacggcgctttgcgcatcgtaggctttgcacgccactaacaggcggcgaattggctcggggctgtcaggtgtttcgccaatcacggagtaggtctgttccacgccatgctccaccagtgtcaacccgggcccggcttgatagctcgccaggcgtgcggcatcgcgcaggatcaagcgcacaggcacgcccgcgcgggccaggcgcgtggcccagagtgtgccgaggctgccggcgccgagaatatgccaggtggtcgacatcagtttgtgctccgtaggatagctcacggtgaacgggacgaaagaaccgctataatgccccggcattttagctcgggcgcgctccatctctactgagcccgccccttatattggagaaatgacatgccttcgttcgacgtggtatccgaactggacaaacacgaagtcaccaacgccgtcgagaacgccgtcaaggaactggaccgtcgctatgacttgaaaggcaagggcagtttcgaattcaaggaaaaggaactgaccgtcaacctgaccgccgaagccgacttccagctggaagcgatgatcgagatcctcaagctgtcgctggtcaagcgcaagatcgacgcacaatgccttgaaatcaaggatgcgtacgcctccggcaaactgatgaaacaggaagcggtgctcaaagaaggcatcgacaaggagctggcgaagaaaatcgtcgcccacatcaaggatgccaagctgaaagtccaagcggccattcagggtgagcaggtacgtgttaccggcaagaagcgtgatgacctgcaggaagccatcgctgccctgcgcgccaagaccttcgacatgccgctgcagttcaataacttccgcgactgatggccctttggggaaccagtcgatgtttttgacgtcccacgccccagagtctgtgcctgcacttgagccctccggggctcatttgcgttttcaggcagccaacaagccgtacatccgctaaacaggagaagctacatggatttaaacgcagaagtggatcacctgatcaagacctccgagtcttggctcccgatgatcatggagtacggcagccggttcttgctggctgtggtcacgctggctatcggttggtggctgatcaacgtgttgacccaccgggttgggcgtttgctggcgctgcgtaacgctgacctggcattgcaacacttcatcactagcctggccaacatcgcgctcaaagtcatgctggtggtcaacgttgcgtccatgatcggcgtggcaaccacctcgttcgttgccgcaatcggtgccgccaccctggccatcggcctggcgttgcaaggcagcctggcgaacttcgccggtggcgtgttgattctgttgttccgcccgtttcgtattggtgactggatcgaagcccagggtacttccggtaccgtcgacagcatccagatcttccacaccgtgttgcgcaccggcgacaacaagaccgtgatcatccccaacggcagcctgtccaatggcctgatcaccaacaccaaccgtcagccaacccgcaaggtggtgtttgacgtgggtgtcgactacgaagccgacctgcagaaagcccgtgaagtgctgttggaactggcgaaagacccacgggtgttgactgatccggccgccgttgccgtggtttcgaccttgggtgacagttctatcactgtttctctgcgttgctggaccaagacgcctgattattgggatgtagtgttcatgctcaatgaactggcgcgcgatcgcttgaaagcggcggggattgatattccatttccgcagcgggtgattcgagtgatgcaggaaagtgctgcgaagtaactaggtgagatgctctcgaacttggctgaaaggtcaggttcgattgcaaaagtttaaactcgatagttagcttgctagttatttctttggtgaaataatgctgcaataaaaaagccgctcccttgtgaacaggggagcggctttttatttaaggccggggccttaagccatcgttgtaatcaaataaccaattacaagatgttcagcgggtattgcgcgatcagacgcagttcgtcgatcgacgccgaaccgtagtacacgccgtcagacgaacgataggtcgcttgacgtacacgcaggctcaggtcttttgccgggccgctctggatcacgtacttggcttcgatgtcgcgttcccactctttgccgttcgaggtggtggcggtgttggcgccactgccgctgacgtaacgagtcatgaagctcaggcctggtacgccgaaagtggccatgttcaggtcgtagcgagcttgccaggatttctcgtcttcagcgttgaagtcggaacgggcgatggagttggccaggaacactgtgccgccgccgtctacgccgtagccgtagtcaccgtcaccgctgactttctggtaggccagggtgaaggtgtgagcctggatggtgtacgcgccctgcaagctgtaggcacggttatccagtttggtggtgccgtctttttctgcgcgttgcaggccggcgccatcgctcttggtgctgtagatgttgaagtcaacggccagggactgttcgttgctcagcgcgtgagtccagttcaggttggcgtaggttttcttccagtagtcttcagtcttcgcgtagtacaggctggcgctgacttccggcgtcagggcgtagacaccaccgatgaagtcggttttggtcaggcccaggctgtcacggtaggtctggttctgtgccacgctcgaagtgaagtgaccgccttcgagtttcaggcccttgatctcgttgctggtgatcgagataccttgcggcagctctggcagcaaacggctgtcatcggaggcgaacaccggtgcggtggtgtattggtcgccgattttcagcacggtgtcggagatgcggaacttaacagcgccaccgcctttggagtagtcgtcttgcgagcgaccgtctgaaccggtagggaacaggccggtgcccgagcgccccttgccgctgtccagtttcacgcccagcaggccgatcacgtcaacaccgacaccgatggtgccttgggtgtagcccgactggaacaggccgttgaagcccaggccggtttcgttgacgcggcttttgccggtgtcgttgttacggaagtcgcgaccgaagttcagcaggcgagtgttgatgctgaacgtgctgtcttcaacaaagcccttggaatcgtcctgggcggacgccattgcgaactgcgaggtaccggctgaaacagccagtgcgatcatgctccacttcatcacgcgcatcgtgatttgctcctttggttttaggaagagtactgccgtcccacctgtatttttatctgggcggctctttcttttatgtgtcggcgcaaagttatatcacgcagaccctattgacgatacttacccatctatcctttcagcttctttacgaggctgtcgtaaattgctatctccctgtcgcaaattcacagcccgacggtaaccgggctgacaacttcaatgctcttttcaaaccggtttaaaagtttgaactcttccttgatgaacattgaaacgctactgttttttatcgcgaaacacgggcttccaaaccggtgtcgttgccgacgatatgggtgtcaatgcaacaagcgtgcacaaagcggtaactgaatgtcattttttcgtgaaaaacgttacggccgtgtaaaaaccgcataagcacgggctttttgcgccctttggtttgggcttgacgctcgggtatttcctttgcccggtggtacacaaaacctgcgcctgggtaaaacgttaccggttcacccttataagtgggtactcggcggatccctttgaggcacaggtgggtcattttggtgcgtcccgttgaggcccggtttagcgtagctcaaatattgatttgcatcgaaaaggtgcatgctttttgtcggtcggcatccgcgattcccgcattcgccgtgaagccgcaggttttcaacggtatgctgggcgcctgaaaccgacctgctgaacggagtgccccgtgtttgctttagatcaacgcctgcgacaagacacactggccattggggacttcccgctctgccgcctgctcctgtccaatgattcgaattacccctggttcattctggtaccgcgcatagacggtatcagcgaagtgtttcaactcgatgtcgtcgatcaacaaaggttgtggcaagaaaccacggccctggcgcagttgctcaatgaggggttgggcgccgacaagatgaacattggtgccctgggtaacgttgtcagccaactgcacgtgcatgtgattgtgcgcaagcgcgatgatgccgcgtggccggcaccggtgtggggcaagcacccggcgcagccttatacgcaggagcaagtggcggcgattcgtgcgcgactgcgcgacctcttgcccgccgacttcaccttcacccaggactgaaccatggatctgcaagaccgcgttaccgacctggagacccgcctggctttccaggacgacaccatcgagaccctcaacgacattctggtcactcagcagcgcgcggttgagcgcctgcagttacagatggccgccttgctcaagcgccaggaagaaatgggcggtcagttcgagacctccgaagaagaggcgccgccgccacactattaatgggcgcgcataaaaaaaccgcgatccggcagggccggatcgcggtttttttgtacgccgagtgtgggtatcagcgacgcggcagtgccgcgatcacgtcttcggcttgcaggcctttgtcacggttcatgacggagaactccacgcgctggccttcgaccagaacgcggtggccttcgccacggatggcccggaagtggacgaagatatcgtcgcccgaatcgcgggaaataaagccgaagcctttggaggtgttgaaccacttgacggtaccggtatcccggttggtcatgtcgtagttttgcgacgcggccgctggggacgaacggtaaaagctgatggccaggtgaagaacgatggcaaccagagcaatgaccaggctgagcaggatggccggatggccgcccacttcaggcatgggtgccaggagggtgagggtttgaacgacaacggtcagcaccagcagcgcactgaccaggttttgcagttgatgacgcgtgcctttgttccagtaagggatcaccggtgcgagcgccaggttaagaaggccgaacaaggccaggtacagagcatcgtgttgttccagatacggcaggctttcaggctgcaggctcgggataaaggacagcagcaaagctgcaacgcccgttagcaggtggacgattttcaacattttgattaactcacgttaagacggatcacaaggaagagctgactggcacggttcgcttctgaacaagatgggaggcgttgagcacgtgcgcggagatcagcctatgtggcgtgccgcagaaataaacggcaaccacaccgcgtctatttaacagcaaaggctgtgcctactcaaatcaagcatttcagggggttgcaagcgccagggcatttacggggcaaatgcctgtcctagacaggtgcaggtgtttcgctcgagattttgagaaatctcctatcctgcgcaaaggcttgtctgtcggtaacgcgcgggtagcgcaggggcgatttgccgcatgccaggtggggatgccgggctgcacacggccggcactcttgctagagtgggcctgcacctgatcaatgaatgcacgtcaattgaaggggaaaaacatggcaatcgatattggtatcagtgaagaagaccgtaaatccatcgtcgacggactttcacggctgctgtccgatacctatgtgttgtatctgaagacccacaactttcattggaacgtcacgggccccatgtttcgtacactgcacttgatgtttgaggagcagtacaacgagctggcgctggcggtggactccattgccgagcgtatccgtgcccttggtttcccggcaccgggtgcctactcgatttatgcccgtctgtcctctatcaaggaagaagagggtgtgccgagtgctgaagagatgatcaagcaactggtggcgggccaggaagcggtcactcgcaccgcgcgtggtatcttcccgctgctcgacaaggtcagcgatgaaccgacggcggacttgctgacccagcgtatgcaagtccacgagaaaaccgcgtggatgctgcgctctttgctcgaaaaccagtaaccgcccctcgagtggcgccgcccgggcgccgctcgcttgtttcgccgcatatcctggcgttgtcctacgcgtttcaaatccccgtcttctggctgcctcgcacgccctcctgttttataggcccactgcccattgggagaagcccatgggttgctgtttggcaatggagtgtcaggtgtatgtcacgcgcagttggtaacggagtgatggaaaccgctggttttcataagataaaggtcgatccctttgcgaaagggttcgatatgggcctggccaagccattgtcccggtcagtcaggctcaacgggttttccacttgcctgcggcttgagcagatctattggaatatcctcacggagatcgccatgatcaatgcgtgttcggtcagtgcgttgctgtcgtatgtcgaccgggaagtgcatttgcgctatggcggcgtgaagaacttcagtgggttggtcagggtggtgtgtgtggttcatctgctcaaagggcgcgtgagccacgcttgatccagcggctcgggagccggcctgccgtcaaggcgggccgggttcggggcagaaagccggctgcgctgcctcgatttaccagatataatcccgcgctttgctgtgcgtgccgggtctgtacctggagggcacggcgcagtaacgacctgatcgccgagacatctccatgcccatgtacgactatcaatgtgcttcctgtggtcatcagttggaagccattcagaagatcagcgcagcgccgctggtcgattgccccgcttgccaggcgcctgagctgaagaagatgttgtccatgccgggctttcgcctgagcggcagcggctggtacgagaccgacttcaagaccggctcgaagaagaacctggcgggcggcgacaaagcagactgagttgaactctacgcgcaggctcctgcattatccgtcccctgctttaatgtacggtgacgaggcgggcctccaccgaatttcgaattacgagaagtgaaaccactaccatgatgcgcagccactattgcggccaactgaacgagaccctggaaggtcaggaaatcactctttgcggatgggttcaccgtcgccgtgaccacggcggggtgatcttcctcgacatccgtgatcgtgatggtctggcccaggtggtgttcgacccggaccgcgccgaaagcttcgccgccgccgaccgcgtgcgcagcgaatacgtcgtgaagatcaccggcaaggttcgcctgcgtccggccggtgccgtgaacaagaacatggcgtccggcggcattgaagtgctgggctacgagctggaagtgctgaacgagtcggaaaccccgccgttcccgctgaacgaatactccgacgtgggcgaagaaacccgcctgcgctaccgcttcctggacctgcgtcgtccggaaatggccgagaagctgcgtctgcgttcgcgcatgaccaccagcatccgccgcttcctcgacgaaaacggcttccttgacgttgaaacgccgatcctgacccgtgccaccccggaaggcgcgcgtgactacctggtgccaagccgtacccacgccggttcgttcttcgccctgccgcaatcgccgcagctgttcaagcaactgctgatggtggccggcttcgaccgttactaccagatcgccaagtgcttccgtgacgaagacctgcgtgccgatcgccagcctgaattcacccagatcgacatcgagaccagtttcctcgatgaaaaagagatcatgggcctgaccgaacagatgatccgcaacctgttcaaggaagtgctggacctggagttcggtgaattcccgcacatgaccttcgaagaggccatgcgccgctacggttccgacaagccagacctgcgtaacccgctggaactggtggacgtggccgaccagctcaaggaagtcgacttcaaggtgttcagcggcccggccaacgaccctaaatgccgcatcgcggccctgcgcgtgcctggcggcgcgagcatgccgcgcaagcagatcgacgactacaccaagtttgtgggtatctacggtgccaagggcctggcgtacatcaaggtcaacgagcgcgccaacggtgttgaaggtctgcaatcgccgatcgttaaaaacatcccgttggacaacctgaatgcgatcctcgatcgcgtgggtgccgtcgatggcgacatcgtgttcttcggcgccgacaagtccaagatcgtcagcgaagcgctgggcgcattgcgcatcaagctgggccacgacctggacctgctgacctgcaagtgggcgccgatgtgggttgtcgacttcccgatgttcgaagagaacgacgacggcagcttcagcgccttgcaccacccgttcactgcgccgaagtgctccccggcggagctggaagccaacccggctggcgcgctgtcccgtgcctacgacatggtcttgaacggtactgagctgggtggcggttcgatccgtatccaccgcaaagagatgcagcaagcggtgttccgcctgctgggcatcaacgaagcggaacaggaagagaagttcggcttcctgctcgacgccctgaaatacggcgcgccgccccacggtggcctggccttcggcctggaccgtctggtgatgctgatgaccggcgcccagtcgatccgtgaagtgatcgccttcccgaaaacccagagcgctgcggacgtcatgacccaggccccgggtgtggtggatgccaaggcactgcgcgaactgcacattcgtctgcgcgagacgccgaaggctgagtaaggctgctgcgtgaaagcgcaataaagttgtaggcagtcaaaaaggcgcatcttcggatgcgcctttgcgtttaaaagaaggaattcctgcctggggcgggattgatcaggtttttacagaatttcggagttgcgttatggctggccattccaagtgggcgaatatcaagcaccgcaaagagcgtcaggatgccaagaaaggcaagatcttcaccaagtggattcgtgaactgaccgtcgcggcccgtcagggcggtggcgatccaggctccaacccgcgtctgcgtctggcgctggacaaggcgttgggcgccaacatgagccgcgacatcatcgaccgcgccgtggcccgtggtgccggcgctgccgacaccgacgacatggtcgagctgagctacgaaggctacggcccgggcggtgtggcggtgatggtcgagtgcatgaccgacaaccgcaaccgcaccgcagcggccgtgcgccatgcgttcagcaaatgcgggggcaacctgggtaccgacggttcggtggcttacctgtttgagcgcaaaggccagatcacgtttgcgccgggcactgatgaagacgcgctgatggaagcggccatggaggcggatgccgacgacgtggtgaccaacgaagacggctccattgacgtattcacctcgtttgccggtttctacgccgtgcgtaacgccttggaagccgctggtttcaaaggtaccgacgcggaaatcgtgatgctgccgaccaccagtgccgaactggacctggacggtgcgcagaaagtgctgaagatgctggatatgctcgaagacctggatgatgtgcagaacgtgtactcgaatgccgacattccggaatcggtagccgagcaactaacctgagcacaatgaaaatcccctgtgggagctggcttgcctgcgatagcatcaccccgattctgcagatgtaccgaggtgtctgcatcgcaggcaagccagctcccacatttgattgttgttggccgcaagaattgtgtttacccaacccgcaggcgttatgactttaatcctaggtatcgaccccggttcgcgcatcaccggttttggcgtggtgcaacaaacccctcgcggctgcatctacgtcgcgtcgggctgcatccgcaccggtgcgggtgagttgcccgagcgcctgcagatcgtctatcgcggcgtgcgtgaggtgatccagacctacggcccggtcaccatgggcatcgaaaaggtcttcatggccaaaaacgccgattccgccttgaagcttggccaggcccgtggcgccgccatcgttgcctgtgctgaagaagggctggaaatcgccgaatacaccgccacccaagtcaaacaggcggtggttggcaccggtgcggcgaataaagagcaggtgcagatgatggtcatgcacatgctcaagctcacttcaaagccgcaaatcgacgcctccgacgccctggccatcgccatttgccatgcgcacacgcgctccagcctgctgccgcatggcctgggtaccgcacgcagtcgtggcgggcggctgcgtctctgatagcatcagcgcaaccgtattttccggtcaggccttgatctgaccccaagctttaaggatcgaaccgtgattggacgcttgcgcggcaccctggctgagaaacagccgccgcacctgattctggatgtaaacgggttggggtatgagctggaagtgcccatgaccaccctctaccgcctgccgtcggtcggtgagccgatcaccttgcatacgcatctggtggtgcgcgaagacgcgcaattgctctatggtttcattggcaagcgtgaccgtgacttcttccgcgagctgattcgcctcaatggcgtggggcccaagctggcgctggcattgatgtcgagcctggaagtggatgagctggtgcgagccgtttccgcccaggacacctcggccttgaccaaggtgccgggcgtgggcaagaaaaccgctgagcgcctgctggtggaactcaaggaccgtttcaaggcctgggaagtggtgccaagcatgtttgccctggtgccgaaccagccggatctgccggcaggccaaatggccagcgccgaaagcgatgcggtcagtgcgttgatctccctgggctacaagccgcaggaagccagcaaggccgtgtcggccatcaaggacaagaacctgagcagcgaagacatgatccgccgagccctgaagggaatgatttaagtgattgaagctgatcgtctgatcgcggccaccggcccgcgcgaccgtgaagaagtccaggaccgggccattcgcccgctgagcctggccgactatatcggccagcccaccgtgcgcgagcagatggaattgttcatccaggctgcgcgtgggcgcagtgagtccctggatcacactctgattttcggcccgcccggcttgggtaaaaccaccctggccaacatcattgcccaggaaatgggcgtgtcgatcaagtccacctccggcccggtgctggagcgtccgggcgacctggcagcgttgctgaccaaccttgagccgcacgacgtgctgtttatcgacgagattcaccggctgtcgccgatcgtcgaggaagtgctgtacccggccatggaagactttcaactcgacatcatgatcggcgagggcccggctgcgcgttcgatcaagctcgacctgccgccgttcaccctggtaggtgcaaccacccgggccggcatgctgaccaatccgttgcgagaccgtttcggcattgttcaacgtctagagttctatagcaccgccgaccttgcgaccattgtcagccgttcggcgggtattctcggcttgccgctggacccggaaggcgcgtttgaaatcgcccgcagggcccgtggcacaccacggattgccaaccgcttgctgcggcgggtgcgcgactttgccgaggtgcgtgccaaggggcatatcaccaaggcggtggcggacctggccttgaacctgctggatgtggatgagcacggctttgatcatcaggacaggcgtctactcttgaccatgatcgagaagttcgacggtggcccggtgggggtcgacagcctggcagcggccatcagtgaggagcgccacacgattgaggatgtactggagccgtacctgatccagcagggctatatcatgcgcacaccgagagggcgggtggtgacgcgacatgcctatttgcacttcgggttaaacattccgtcacgattgggtgagatgcccgtggtagacgaattcctcgatgcagtggacgattaaaaaggtcacgccacgcgatttatctgaagtttgtgctgtcctagtggctggcgtcgtcattcagtcgttggaaatgtgctgcatcatgcgtagccgaatgaaaaaacagttgcctggccggattggcaacctgaggagtaagcactagagtatgcgcgcgcaaaacggggatcagtcgttcgcacatcgctgtcgcgtttattacgaggacaccgatgctggcggcatcgtgtattacgtcaactacctcaagttcatggagcgggctcgaaccgagcggctacgggagctgggctttgcccaatcccagctggcaggggaggacctgttattcgtcgtgcattccagcgaggcgcgctaccacgcgccggcgcggctggacgatgagttgctggtcagcgctgaagtaatcgaattgaaccgtgtcagcctgcgtttcaagcagcaggtcaggcgggcaacggatgcaacgttgctctgtgaggggcagttcctggtggcttgtgtgcgcaccaatagtttgaaaccccgggccattcccgaagctctacgtgcggcctttgccggcgtaagcggcgcgggtaaacaatcaaagcaggagatttagcgtggaacctaccgtcgtcgaccattcctccatgtggagcctggtcagcaatgccagtgttgtggttcaactggtgatgctggtcctggtagccgcatcggttacctcttgggtcatgatttttcagcgcagcaacctgctgcgtgccggtcgacgtgccctggagagctttgaagagcgcttctggtcgggtatcgacctgtccaagctgtaccgccaggccggcagcaaccctgatccggattcgggcgtagagcagatcttccgcgccggtttcaaggaattctcccgcctgcgccagcaaccgggcgttgacccggaagcggtcatggaaggcgtggcccgtgccatgcgcgttgccatttcccgcgaagaagagaagcttgagcaaagcttgccgttcctcgcgaccgtaggctcggtgagcccgtatatcggcctgttcggtaccgtgtgggggatcatgaactccttccgtggcctggcgcaggcccagcaagcgaccctggccactgtggccccgggtatcgccgaagctctgatcgccaccgcgatcggcttgttcgctgctatccccgcagtaatcgcttacaaccgttttgccgctcgcggcgaaaccttgatcagccgttactacaccttcgccgacgaattccaggcgatcctgcaccgtaaagtgcacaccagcgaagaataagcaggtaattcccaatggctttaatcgctcgagctcgcaaaaagcgcaagccggtcgccgagatgaacgtagtgccttacatcgacgtgatgctggtgctgctggtgatcttcatggtgaccgcgccgatgctcaatcagggcgtgaaggttgatctgcccaaggtttccagcgaagccttgccgcaagacaacaacactcaggtcctgaccatttcgatcaaggctgacaagacctattactggaaccttggcagcgaagtcgatacccagaaacagcaggacaaggccatgaccttgccgcagatgaccgacgccgtgaccaagatcatccggtccggcaacgaaggcggcaagcacacgcaggtgttcattcgcggcgacaaagtggtcgactatggctccgtcatgggcgccatgggcgggctgcagaaggccggcgtgggtaacgttggcttgattaccgaggcgccctgatgcagcaacagcgagagccgtccgcctcggaaagctacttctggcctagcgtctgggcaattgccctgcacgtcctggtgtttggcatgctgttcgtcagctttgccatgaccccggacctgccgccagccaagccgatcgtgcaggcgaccctgtatcagctgaaatcgaaaagtcaggccaccacccagaccaatcaaaagattgcgggtgaggcccagaagtcggctgcgcgccagactgaagtcgagcagatggaacagaagaaggtcgagcaggaagcggtgaaggctgctgcggaacaaaagaaagaagaggcggctcaaaaggccgaggaatcgaaaaaggctgacgaggccaagaaagctgacgaggcgaaaaaggctgatgaagccaagaaagccgagaaagctgccgaagccaaaaaggccgaagagaaacaattggctgatatagccaagaagaagtctgaagaagaagccaaaaaggctgccgaagaagaggccaagaaaaaggccgctgaagacgccaagaaaaagatagtcgaagacgcgaagaaaaaagccgccgaagacgccaagaaaaaagctgaagcagacgaggcgaagaagaaagtcgccgacgacgcgaagaagaaagctgccgccgacgccaccaagaaaaaggcccaggaagcagcgcgcaaatccgccgaagagaaaaaggcccaggccttggcagacttgctttccgacacgcctcagcgtcagcaggccttggccgatgagcgtggtgatgaagtcgcgggcagtttcgacgacctgattcgggcgcgggcagcagagggctggacacgtccaccttcggcacgtaaaggcatgacagtagtgctgcagatcggcatgttgccggacggtacggtgacttcggtcggcgtagccaagtccagtggtgacggttcgttcgacagttcggcggttgccgcggtcaagaacattggccggttgaccgagatgcagggaatgaaaccaagcgacttcgctccctatcgttcattcaagatgacattcacacctgaggatctagccttgtgagaaaccttcttcgaggaatgcttgtcgttatttgctgtatggcagggatagcggcggcggatgaaaagaacattctggtcaccagcggtagcgatcgggccaccccgatcgcggtagtaccgttcggctggcagggcggcagcgtgctgccggacgacatggcccagatcgtcagcgacgacctgcgcaactccggttactacgcaccgattcccaaaggcaacatgatcagccagccgacccaggccagcgaagtcatcttccgtgactggaaagccgtgggcgcccagtacctgatggttggcagcatcacgccagccggcggtcgcctgcagatccagtacgcgttgttcaacgtggccaccgagcagcaggtcctgaccggcagcgtatcgggcaccgccgagcaactgcgggacatggcccactacatctcggaccagtcgtttgaaaaactcactggtatcaagggtgcgttctcgactcgcttgctgtatgtgacggctgagcgtttctccgtagacaacacgcgttacaccctgcaacgttcggactacgacggtgcgcgcgcagtgaccctgctgcaatcccgtgagccaatcctgtcgccgcgctttgcgccggatggcaagcgtatcgcctacgtgtctttcgaacagcgtcgtccgcgtatcttcgtccagcacatcgatacgggccgtcgtgagcagatcaccaactttgaaggcctgaacggtgcacctgcgtggtcgccggatggttcgcgcctggcgttcgtgctgtccaaggacggtaacccggacatctacgtgatgaacatggcttcgcgccagatcagtcgcgtgaccagcggcccgggcatcaacaccgaaccgttctggggcaaggatggttcgaccatctacttcacctccgaccgcggcggcaagccacaaatctacaagacgagcgttggcggtgggggtgcggaacgcgtgacctttatcggtaactacaacgccaaccccaagctttcggctgatgaaaagacgttggtgatgattcaccgtcaggatggtttcactaatttccgggttgcggcccaggatttgcagcgtggaacggtaaaaatcctcacagataccaaccttgatgagtcagctactgttgcgcccaacggcaccatggtaatctacgccacccgccagcagggccggggagtcttgatgctcgtgtccattaatggacgcgtaaggctcccgcttcctaccgcacaaggcgaagtcagagaaccgtcctggtccccttacctgaactgacgcggcgctacaaaaagatttgcttaacacactggggttcattaggagtttcacgatggaaatgctgaagtttggtaagtttgctgctctggctctggctctgtccgtagccgttggttgctcgtctaaaggcggcgacaatgccggtgaaggcgcagctgttgatccaaacgctggttacggcgctaacactggtgcagttgacggctccctgagcgaagaagctgctctgcgcgctatcaccactttctacttcgaatacgacagttcggacctgaagccagaagccatgcgcgctctggacgttcacgccaaggacctgaaagctaacggcgctcgcgttgttctggaaggtaacactgacgaacgtggtactcgcgagtacaacatggcactgggcgagcgtcgtgcgaaagccgttcagcgctacctggtactgcaaggtgtagctccagcccaactggaactggtttcctacggtaaagagcgtccagttgctactggccacgacgagcagtcctgggctcaaaaccgtcgcgtcgaactgcgtaagtaattcgtcatgcgaacgtgccgtcgtgctctgactgtattggctctcagcctcgcaccgcttgcggtgtgggctgcggttcctgtggaagatagcaactctggctataacaatagcgggagcagctatccgccagcaggttatggcacgaacggcgcctatgctgggggaccggcaactgctgctccctcggcacagggcgaactgttcaaccagctgcaacgcatgcaggatcaattggcgcagcaacaaggcaccattgagattttgcagaaccaggtgaaccagctgaagcaagaaggcctggagcgttaccaggatcttgatcgacgtattggagccggcgttacacctgccgccactcctgataattcctctgccggtggcgcgcctgttgcggccgccggtggtgcagcagcgggggctgcagccgcaagccaagcccctgccgccagcagcgaaccgggtgatccggcgaaagaaaagctgtattacgatgcagctttcgacctgatcaaagccaaggatttcgataaggccagccaggcttttaccgccttcctgcgcaagtacccgaacagccagtacgcgggcaacgcccagtactggttgggcgaggtcaacctggccaagggggacctgcaaggtgccggccaggcatttgccaaggtcagccagctttacccaaagcacgccaaggtgcctgattcgctgtacaaactggctgatgtggaacgccgcctgggtcataccgacaaggtcaaaggcattctgcagcaggtggtcgcccagtatccgggtacctccgctgcccagttggcccaacgggatttgcagcgcctgtaagcgatgctcgcccgtttagaagaaacccgcgcctggcgcgggttttttcgttagaatccacgcccttttatgaaacacgcttcctggggtctacgcgttggcgggatcgcttgaagtgcctgacggaggcggacagcctgtttagctgttacgcccgtggcgactatgcaagacacattacgcattaccgaagttttttactcgttgcagggtgaaacgcgaacggctggcctgcctaccgtatttgtacggttgaccggctgcccgttgcgttgccaatactgtgacagcgcctacgccttcagtggcggcaccgtgcgcaccctcgacgacatccttgagcaggttgccggcttcaagccgcgctacgtctgtgtgaccggcggcgagcccctggctcagcccaatgccatcccgttgctcaagcaactgtgtgacgccggctacgaagtctcgctggaaaccagcggcgccctggatatctcggccgtggatccgcgtgtaagccgcgtggtcgacctcaagactccaggctccaaggaagcgcaccgcaacctttaccagaacatggacctgctgacgcctaacgatcaggtcaagttcgtgatctgctcgcgcgatgactacgactgggccgcttccaagctgatccagtacggcctggatcgtcgcgctggcgaggtgttgttctctccaagtcaccatgacctgaacgcccgtgatctcgcggactgggtcgtggccgacaacctgccggtgcgcctgcaattgcagctgcacaaatacctgtggaatgacgagccagggcgctgagatgacggatcaacagcgtgccgtcatcctgctctccggcggcctcgactccgccacgctggtcgccatggtccgcgcggaaggctatagctgctacaccatgagcttcgactacggccagcgccaccgcgccgagctgaacgccgcggcccgtgtcgcccgtgacttgggtgtggtcgagcacaaggtggtcggcctgaacctcaatggtatcggcggttctgccctgacagacagccgcattgacgtgcccgaagcgcccagcgaaggcatcccgctgacctacgtgccggcgcgcaacaccgtgttcctgtccctggccctcggttgggctgaagtactcaatgcccgcgatatcttcatcggcgtcaacgcactggactacaacggctacccagactgccgccccgagtacatcgagtcattcgaacgcatggccaacctggcgaccaaggcgggtgtggaagggcagggctttcgtatccgggcgccgctgcagaacctgagcaaagccgacattgtgaaggctggtgtaggactgggcgtcgactatgcgcagactgtttcctgctaccaggcggacgattccggccgtgcatgtgggaaatgtgacgcctgcagattgcgcgccgaaggcttcaaaaacgccgaaatggccgacccaacgcgttatttctgatttatttcaaataaggtgttgaataatccttagaaatcagtattatacgcgccaccacacagcgggtcgttagctcagttggtagagcagttggcttttaaccaattggtcgtaggttcgaatcccacacgacccaccatttttggcggtttagaaaatccggaaggcccacgcaagtgaggatttccgggtttttttttgccttgtgaaaaagccgcctgagcacaggcggcccgtgttgcggcccctagccaaaccgccccgtaatgtaatcctccgtctgcttcatctttggcgtggtaaagatctggtctgtcttgccatgctcaatcaattcccccatgaacatgaacgcggtgctgtccgacacccgcgcggcttgctgcatgttgtgggtcacgatgatcacggtgtactgggtcttcaattcagtgatcaattgctcgatgcgcccggtcgagatcgggtcgagggctgaggtcggttcatccagcaatagcacctgtgggcgcagtgcaatggtgcgcgcaatgcacaaccgttgttgctggccgccggagaggctttgcgcactctggttgagtttgtctttcacttcgtcccataacgcgccgccgcgcaaggcttgctcgacgcggtcattcatttcgcggcgagacagcttttcatggtggcgcacggcgtaggcgatgttgtcgtagatcgacatcgggaacggcaccggcttctggaacaccatgccgacgtgactgcgcaggcggttcatcgaatagcccggggcgaggatgttttcgccgttgagcagcacttcgccacgggcttcctgtttcgggtacatcgaataaatgcggttgaacacgcgcagcaacgtggatttgccacagcccgaagggccgatgatcgcggtgatgcgtttttccgggatgtcgatgtcgatggacttcagggagcgttggttgttgtagaaaaactccaacccacgcacacggattttggttttttcgggatcaatgccagtggcgtccatcagtgagacctattgcgtaaaaggatcaggcgagatgccaggctgagtaccagcacaaacagcgtcaggaccagcgcgccggcccaggcgagggcgtgccagtcgtcgaacgggctcatggcgtactggaaaatcaccacggggacgctggcgatcggcttgagcaggttgctgctccagaactggttaccgaacgcggtgaacagcaggggcgcggtttccccggtgatgcgggcgagggcgagcaggatgccggtgaccacgccggccttggccgccctcagcacaatttgcagcgtcagcttccactgcggcacgcccagagccaacgcggcttcgcgcatggtcgagggttgcagctggagcatttcatcggtggtgcgcaccaccactggaatcaccagcaaggccagggccagcgcgccggcgagggcggaaaaacccacttggtgattcgtcagcaggttcagtggcaggatcacggcggtgtagacgaacagccccagcacaatcgacggcgcggacaacaggatgtcgttgatgaaacgcaccgtggtccccaggcgtgagtgccgtgcgaattcggccagccagatgccagccatcagcccgatgggcgtgccgaccaccagggcgatgaccgacatcagtgcgctgccgtagaacgcgttggccagcccgccttcagtaccgggcggcggggtcatctggctgaacaggcgcaggttcagcgcctgaaaaccattgatgatggtggtcagcagaatccacgccagccacagcaagccaaaggccgtggcgccgcaactgagcaacattgccacgccgtttttcagcgcgcgtttgcgatacaggcgttcgttggcgttcatagaccttccttgcgcgacaggcgcatcagcagcaaccgcgcgagcgccagcaccacaaatgtcacgataaacagcaggaagcccaaggcgatcagcgcggagcggtgcagatcggtgtaggcctcgctgaactcgttggcgatgaccgaggcgatggaactgctcggcatcagcagcgaagcggaaaactgctgcgcattccccagcacaaaggtcactgccatggtttcgccgagggcgcggcccaggccgagaaagatgccgccgaccaccgccgagcgggtgtagggcaggacgatgtcccacaccacttcccaggtcgtgctgcccagcgcgtaggcggattctttcaattgcgtgggcacgctgcgaaacacctcatgcatgaccgacgtgataaacggcatgatcatcaccgccagcacgatgccggcagtgagcatgccgatgcccagcggcgggccctggaacagcgaacccacaaagggcagggcgccaaggtaatcgttgatgtaaggcgacaggtactcggccatgaacggcccgaacacaaacaggccccacatgccgtagatgatcgaaggaatgccggcgagcaattcgatggccgacgcgacgggcattttcaaccagggcggcgcgacctccgtgagaaaaatcgcgataccgaaactgaccggcactgcaatcaacagtgccaggaacgaggtcaccagggtcccgtagatcggcactacggcgccaaagtgattgttgaccgcatcccattcggtgctggtgatgaagctgaagccgaaggtcctgaacgcctggcttccgccccaaagcgtcgaggccgcgatgctggcgagcaacagcagcaccagcatggcggccccgaacatcgagcgtttgaaccacaggtcgtggcgttggtcgcgggcagcgcggttgtcgcccgctgtgtcgctggcgtgagtagtcataaccaggggttggacggtgtcattcatatcagatgtgctcaccgccttctctgatcaccagagaaggcggtcgtagggcgaatcagttagtgaagtcagacttccagtaaccttcgattcgcgacaccagggagtccggcagagcgacgtagtccagtgcagcagcctgttgttggcctttttccagcgaccacttgaagaagctgaaggctgcctggctttgctcggcgttcttcggctgtttgtacatgatgatccaggtggtggcggtgatcggccatgcgccttcgcccggcgcgttggtcatgatcaggttgaagtctttggcgctggcccagtcagcggtatcggcggcggcctggaaggctttggcgttaggcgtgacgaatttgcccgcggtgttcttcaactgcgcgtaggtcattttgttctgcagcgcgtaggcgtattccacgaagccgatggagttcttgatctgcttcacgtaagccgaaacaccttcgttgcctttgccgccgacacccactggccacggtacggtggtgccgaaaccgatcttggttttccagctgtcgttgaccttggccaggtagttggtgaagttgtacgaggtgcccgaaccgtcagagcggtgcaccaccgtgatgttcgccaccggcaggttcaagcccgggttgagggcggcgatggccgggtcgttccaggccttgatgtcgccgaggaagatttttgccagcacgtcgccgtcgagtttcagctggcctgcggccacgccttcgacgttcatcaccggcacgatgccgccgatgacgcttgggaactggcccaggccgccggctttgagttcatcggctgacagtggggcgtcggaggccccgaagtccacggtcgccgccttgatttgggcaatgccgccgccggaaccaatcgactgatagttgatgcggttgctggagtttttgctgtagtcctgcgaccacttggagagcacagggtagacgaagctggagccggcaccggtaacgtcggtggcgtgggctacgccactcaggcacagggcggtcaacaacacagacagactttttttgctcggcaacatcacgacaacacctcaagggaaggggtaagtggaagggtccacctgtctaagacgtgacgatttaattcctgatatatgtctgtttaatgacggtttggctttatgaagaaacatttagaaatgtttatggcggatggccggtacggattcattccgctggcgtttcttctgtctcaataaagtattggcagatcaaccggtcttcacgcaaacactgctcgctcgccggcatccccgtggcttcggaaaagaacgccgccatcgctctgcatacacattgttcttcacgcaccacgctgcctaccgggcaggtgaagttgcgcaccatcacaccgcctttctgcggcacggcttcagtgctggcgcccagggcgtcggcggcagccatggcggaacgcaggccgctgtcgaaagtgacgggattggccaggccggcgcgttgggccagttgacggccggtttgctccagcacttcgcccagttcgtcggcgtcgtagcgatccttgagagtggccagcagttgcgtcagcagtacctggtaagccgttgaggtgacgtcttcgctacccggcgcggcctcgaacaccacgggcggcttgccgaccgcattcggtgggcgaattttgctgcggcgcacccacccttcggcttccagctgcttgagctgcacgatcaccgcattgcgtgtgacggccaggtgttcgcacagctgcacgacggtcaggggctcgcgctggagaagttgcaggatgtcacttttggtactcacgagcggcaagcttcactggaattctgggggcttgagtataccgccataaaccgtcaggcgaagaggaacaacaataatgacaaattatattgtcattattgttgttaggtgattaaaattcgccgaaatcacccacccgcaggacataaccatgaaaaaagcccagcgtttattgatcgcgctcccgttcgccttcacattgatcggcagtgcgatggcgcaagatgcgccgcagccctccacccccacccagttggtcgatgccctcaacggcgtgtttggccagcacgccggcgcgcgtgcggtgcatgccaaaggcattgtgttggaagggcgcttcaccccgagcccgtctgccgcgtccatcagcaaggccgcgcatttgcaggccacggcggtgccggtggcggtgcgcttttccaacttcgccgggattccggacattgcggacaatcatggtctggccagcccgcgcggcctggcgatccgcttcgcgctgccgaatggcggcagcaccgacattgtcgcccactcgttcaacggcttcccgtcgccgacggccgatgatttccgcgacctgttgatcgccctcggcaccagcggcccggacgtggccaagcccaccccgctggacgcctacctcggcacccacccggtggctaaagccttcctcaccgcgcccaaacctgcgccgcagagtttcgccacgctgccttactacggcgtgaataccttcaagttcatcaacgcggcgggcaccgtcacctttggccgttaccagtttctgccggtcagtggcagccatttcctgagcgaggcgcaaaccgccaaggccaaaccggattacctgagtgaggagatccagcaacgcgtcagcaaaggtgcggtgcgcttcaaactggtggttcaggaagccgcaccgggtgacaagcttgacgacccgtcgattgcctggcccgccagccgcccggtggtggaactgggcactttggaaatcacgcgcgccgtggccgacaacgtcgccgcacaaaaaagcctgatgttcctgcccaataacgtgccggcaggcatcgaaccgcaagatccgatgatcaacgcgcgttccgccgcctatcctgtttcattcggccgtcggcaataagccgtcgccctgcctataagaagaggaagccctgatgagcttgataccgaacaattccctgatcaccgcaaccccggaagaggggcgcgagctggcaatcaagatggcgcggctggtgatcaaggccacgcaacctgatgaagccgtgcgcggcaggctgcgcgatgtgtacgccaatgatgcggcgatgctgatcagtattggccaggtggttgcgaccgagtttgcaaccatcgcagcggccaataagtactggaacccttaacgcagaaagggcaaccaccgcaccgtggttgccctggcgctgttttattcccggcagattgaaaaatatcgtgcgtgcaagggcggtgactgtatgggaagttggtcaccacttcgttttctgcaggggatttaccgatgggcgtcatccagcgtttgcagcaactgggtattgttttgcctgaaccgatcaacccgttgggctcttacaagacgctcagtttgtcgggcaaccaactgcacgtttccggcctgggcccgtttgaaaacggcaagccactgaccggcatcgtcggcgacgacctgtcgattgaacagggccagcatgccgcgcgcctgaccatgctgatgatcctggcgtgtattgaacaaacctttggtctcgacactatccagcgctgcgtgcgcctgacggtttatgtgcgggccacacagtcattcacccagcaccccagcattgccaatggcgccagcgacctcttgctggatgtgttcggtgccgaccaactccctgcccgaagcgcacttggtgtttactctttgcccatgggtattcccgttgaaattgacagtatctttgaagtaaaaccatccggtcacaaaccggttaaaaagtcataaagagtaacgggttaaccgccaaagtcgttgaaatacatgggattgtcggacaatcctgtgtatgaaaaactcttcataatcggcctgctcgaacgttggtagttttctcatcgctgcccaataattcgagtcctaataatgaataacaaaactctaaaaggcgctttggcgctctccatttcgctcgcctccacacaactgttcgccggtggttttgccctcaatgaacaaagcatcagttcaatgggcacaggctacgccggtcgttcgtcctcggccgatgacgccagcacggtgttcggcaacccggcaggcatgtcccgcctcaaacagaatgaagtgagcatcggggcgacctacctcgatgccacgtcgcacatcaaagatgccagttcctcacaaggcggtgtcgataaccctggtaccaacaagggcgacatggtccccggcattgccgtgccgatgggttatctggtcacgccgatcgacgagcactgggcgtttggtctgggggtctatgcaccatttggcctggtcaccgactatgaacacagcttccagggcaacggctttggcaacaaaagcaaggttcaggtcatcaccgtgcagccaacggtcagctatgccttcaacgacaaggtttcggtaggtttcggcccgacgttcaacaagatcagcggtgagctggattccaaagtcccggcgttcggtctgggcactgaaactgccaaaatcaagggtgacgacaccgccacgggcttcaacgccggtatcctggtgcaggctctggatacaacgcgcatcggcgtcacctaccattcgcaagtggtctatcacctgagcggtcataccaacgcctccggcgtgctgtccgacctgttggacggcgggccgcaaaagtatgatgccaaactgaacgtcaccacgccgtcctccgtggacttctcggttacgcaccaattgagtgatgccctgacactctacgtcggcagcacttacacccgctggagccagttgaagaagatcacggtgaacaacaccggcgtgtccgacatcaccgctgagttggcaggcctggattcgattaccgaagagcagcactggcacgacacgtggtcccacgctatcggcctgtcgtatcagctcaacaagcaactggttctgcgtacgggcttctccgttgaccagacaccgaccaacaacaccgatcgttccgtgcgtattcctacgggcgaccgcactgtattcagcctgggtgcaggctggacgccggtggataacctgacctttgacgtggcctattcctacctcaaggaagagccaatcaaggttcacgacaacaaccctcagctggcgctgaactacgacgccaagtatgaaaacagtgccaatggttttggtggttcggtgacttaccgcttctgacctgtggataacggcaaagggccggttttttggcgtggtcctttgccgtaagttttgacctaaatgctgtcaatcgcggcgtgtcttggttagattgaaggctaatcagcttttaggacacggactgtcatgactacgctaacgccgatcatcgcgaccaatcccctcattcttcgcgccgccacgacctcaccgccggcagcgcttgcgaacaccctcgacgtctcaccggcccggccgtcttccgtggtcagcctcggaaatcccgtggccgacattatcgatctctattccaaaaacgggcagctccccggccgccaaaccgtgtgggcctgggaaaacgataatcaggacgcagtcacccaggcgatcagccaacgcttcggttcaatctccacggccagccgttacagcggcctcggtgctgcattggtggatcagttcaccgggggcggcggggcggggatttcacaatcggtgctcaacaccacggcagagcgtgccggtgatgccggcgggatcaaggccgaccaggcggtgttgcacagcaaggccgacaaccaaatcagcctcagcatcaagaccgccagcggcaagacggtgacgttcagcctgttcagtaagaaagacggcttgggcgtgcaggccaccgtcgacggcggcgatttgaccgcggatgaactcaaagccgtcggccaattgggggcggcgttccaggcttcggtcgatgggttgaccgccgtaccgccgaaactcgacctgagcaaactgacccagttcgacaccagcgtgttgaggtcggtggacctcaacgccaaagtcaaaacccaggtgggcgaggacctgagcctggcgttccacgccgacagccaaagccgcaccacacgtatgagtggcccggccggcgacgtcgacctgtctgtggacctgaaaaaccgcgcaatcctgggtgacgccaaacagcaggccaaggccatgaaaacctacctcgcccagttcgaccgggtgcaagagcgcggtagtggcaatgctgatttgatggagatgttcaaggatgcgttcagcgccatgaacagcaactatccccaaggcgctggcgcaacgaatgcattgagcaacaacccgaccgacaaaggtttgctgacagggctggcggacttcaaggcttcgatcaagcaggccgtcggtgcgtccaacgaaatgcgtcctaaggaagtcgacagcttctcctacaccgtgtcgcagaagacccaggtcaatggccgcagcagcgcggaccgcagcgtgacccagaaccagcagtcggtgctgtcggcaaacttccacaaaagcctcggcggtggcgagccaccggtgttggatggtacccgcggatcgcagaactacctgtatgtgcaagtccaggacaaggccagcagcaccgcgagcttctcctataaggatggccaactggcgagtgcttctgtgtcgcagtcggcggtgcagaacacccggacccagaagtacgagatggcccagttggtgtcagacacggtggtgcccaaagatggctcgttcaaacgtgactacctggcgttgctggagcacgcagcccaggcagttaaaaagtccaaggacgcgcgggagcaatcaaccttgaatgacgccctggcggccatgcaggattcggtgctgctacatgactatcccgctgtactgatgcactgaggttgcgcgccatgaaagcgggaaggctcatcacggggccttcccgttttttttgcccgacaggcgtgcgcccggatgccagattaggcttttgaatcgattcgatattctgtagccttgcgcagcttcacccgtgcttgatgaacacaatcacttcgtccggcggcgcccgaagggctccagagccggtggtacactcgactttcgcgcaactgcgcctgcaggtcttgcgaacatgacgcaaatttccgaacgccttctggttcaagcccacctcgacgccaagcagcccaaggctctcagcgccgacgaagaggcgagcctgcgtgccgccatcgccgccgagctgaaagctcaagacgcggtgctggttgcccacttctattgcgacccggtgattcaggccctggccgaagaaaccggtggctgcgtgtccgactccctggagatggcccgcttcggtgcggctcacccggccaagaccgtgctggtggccggtgtacgtttcatgggcgaaaccgccaagatcctcaccccggaaaaacgcattctgatgccgaccctggaagccacctgctccctggatcttggctgcccggtggatgagttttcggcgttctgcgatcagcatcccgagcgtacggtagtggtctacgccaacacgtcggcggcggtcaaagcccgcgccgattgggtggtgacgtccagctgcgcgctggaaatcgtcgaaagcctgatggacaacggcgagacgattatctggggccccgacaaacacctgggcacttacatccagcgtcagaccggcgcggacatgctgctgtgggacggtgcgtgcattgtgcacgaggagttcaagtccaagcagcttgaagacatgaaggcgctgtaccccgacgcggccatcctggtgcacccggagtcgccgacctcagtgatcgagctggccgacgcggtgggctccaccagccaactgattgccgcagcgcagcgcttgccgaacacaaccttcatcgtggccaccgaccgcggcattttctacaagatgcagcagctgtgtccggacaaggtcttcatcgaagcgcctaccgccggtaacggcgccgcgtgccgcagttgcgcgcactgcccgtggatggcaatgaatacgctggagcgcacgttacagtgcctgcgtgagggcagtaacgagatcttcgtcgaaccgtcggtgatcccgcatgccgtgcgcccgctcaagcgcatgctggatttcacccaggcggcgcgcctcaagttggcaggcaacgcctgaaatgtgggagctggcttgcctgcgatagcggtttatcagtcaatattgcagtgactgaacgaccgctatcgcaggcaagccagctcccacaattgatctgtggtgttctcgggttacttcttttgtttgggaattcgcaccagctgcgtatctgaataaatgtcatgccagctgcgcttgcgcttatcaaacaacgaccagataaaccccagccccacgcacaaccacgacgcaatcgacaccacaaaccgcaacagcgcctgccacaggctgatgcgcgaaccgtcggcgttttgcacccgcacgccccacacttgcatgcccagggtctgccccgagtgggtccagaacttggcaaaaaaaccaaacaacacaaaaaacagaatcgtcgacagcaacgggtcaccgtccagcgcgccggactcggtgagcgtgcgcattttggcttcgcccacaaacgcgatccacaccagtttgtagaggaatgcggtgacgatcagcagggcggtgcacaacaaaaaatcataaaacatggctgccaggcgacggcccaggccaacggcggggaactcgccctgggggttcagcaagggttttgacatggcagggtgctctgaataaaaaagccattctacgaacaaacgcgcataaaaaagcccctgatgtcaccatcaggggctttttgtcgcaggaaggatcagccttctgcttgtacttcgtcagcctgcatgcctttctggccttgcacagcaacgaaggtcactttctggccttctttcaggctcttgaacccattgccctggatagcgcggaaatggacgaacagatccggaccgctttctggagtgataaaaccaaaccctttctcgtcgttaaaccacttgacggtaccgctctgacgatcagccattttcttctttcctttgacgctaaaaattaatgacagcccctttcacatgaaagagtactgggctgggttgcaggaaagtaagagacatcgaacgggttgtagcgaacttctttggctactgcccaggtccaggttccaagcgacccatgcaaacacagtgaccaaactttacgccaactaatacagaaaaaacaagccctgccaaaagcccagcgtttgctcgggctgatgatacttttgtgcacggtttggatcccacttattcgatagcgttggtcacttgttataggttaagtcctattgtattgactatcgtcaatgcactgttttatggcggttgcgttacagtttagtgcacgctgacgcaaccgcgttacttataggaacagtcaatcaaccgcgatagtaacgttgcggtacaaatggcattttacttacacgtagtggcacctttttcccacgtaccagcgcagacacttcggtatccagcgcgatgaatgcactgtccagataacccatggccagcgggccacccaaggttgggccaaagccaccgctgcacacgctgccgatgacagtcccgtgttcgtcgacgatttcagcgccttcacgcaccggtgtgcgctcttgcggcagcaggccaacccgtttgcggctgacaccggcttgctgctgcgtgaagatgcggtcggcacccgggaagcctcctgcgcgcgcgccatcggcgcgacgagccttggagatggcccagagcaggctggcttcgattggcgtggtgtcggtgttcatgtcgtggccgtacaggcacaggccggcttccaggcgcagggaatcgcgcgcgcccaagccaatggcctgcacttcggtctctgccagcaggctgcgtgccaggctttcagcgttggcggcgggtacggaaatttcgaagccgtcttcaccggtgtagcccgagcggctgacgtagcagtccacgcccagcagacgcaaggtggcgaactgcatgaaggtcattttggtgacttcaggcgccaggcgcgccagcaccttcaccgccgccgggccttgcagggccagcagggcgcgctcttcgaagagcggctcgatggtgcattgttcgccaatgtgttggcgcaggtgcgccaagtcctgatccttgcaagccgcgttgaccaccaggaacagctcgtcgttacccaaattagccaccatcaggtcgtcgagaatgccgccctgttcgttggtaaacatcgcataacgctgcatacccaccggcaggtcgatgatgtcgacgggcaccagggtttccagggccttggctgcattcgcgccggtcaggcggatctggcccatgtgggacacgtcgaacagcccggcctgatcacgggtgtgcaaatgctccttcatcacgcccagcgggtattgcaccggcatgtcgtagccggcgaagggcaccatgcgcgcgccgagttcgaggtgcagcgcgtgcaatggggttttcaacagggtttcggtggacatattcagctcctgaaaaacgtgctggcgcgccttgggcgtcagcactcgataatgttgaccgccaaaccgccacgggcggtttccttgtatttgcttttcatgtcggcgccggtctggcgcatggtgcggatgaccttgtcgagcgagacgaagtgctgcccgtcgccgcgcaacgccatgcgcaccgcgttgatggccttgaccgaacccatggcattgcgctcgatacacggcacttgcaccagcccgccgatggggtcgcaggtcaggccgaggttgtgttccatgccgatttcggcggcgttttccacttgggaaaccgtgccgcccagcacttcacacagcgcgccggctgccatcgaacaggccacgccgacttcgccctggcagccgacttcggcgccggagatcgacgcgttttccttgtacaaaatgccgatggcagcggcggtgagcagaaagcgcaccacgccgtcttcgttcgcaccgggaatgaagcgcatgtagtaatgcagcaccgctggcacaatcccggccgcgccgttggtgggcgctgtgaccacgcgcccgccattggcgttttcttcgttgacggccagcgcgtagaggttgacccagtcgagtaccgacagcggatcgcgcagtgccgattccgggtgcttgcacaactggcggtgcagcgcagccgcgcggcgcttgaccttcaagccgccgggcaagatcccttcattgcgacagcccgcatccacgcagtcctgcatcacttgccagattttcagcaagccggtgcgggtttccgcttcggggcgccaggcactttcattggtcagcatgacctggctgatggacagcccgtaggtgttgcagtggttcagcaagtccttgccgtgcttgaacggaaaggtcagaggcgtggcatcttcgacaatgcggtcagcgccggcggcgtcttcatccaccacaaaaccaccgccgaccgagtagtactcgcggctgcggatctggatattggcggcgtcgaaggcacgaaaaatcatgccgttgggatggtaggcgaggggtttgcgaatcatcgccaggtgttctttctcgttgaacgcaatgctgtgttcaccgagcaagttcaggcggccgtccttgcgcatctgcgccaggcgaggggccacggtttcagtattcacggtgtccgggtgttcgccttccaggccgaggagcacggccttgtcgctgccgtggcctttgccggtggcgccgagcgagccgtagagttccaccttgacgcaggcggtggcgctcaacaggttgtcacgcttgaggccctcgacgaagcgtgcggcggcgcgcatcgggccgacggtgtgggagctggaggggccgatgccaatcttgaacaggtcgaacacgctgagggacatggttgttctccggtttcttattattgggcgagaatcttgtggttgaactcggtcaatgtgggagccgggcttgcccgcgatggcagtgtgtcaggcaacatttctgtctctgatacaccgctatcgcaggcaagccagcccccacattgaaccgtgttccgtcagtcggttacgcgtaactctcgatcgacgggcacgcacacaccaggttgcggtcgccaaacacgttgtccacacgcccaaccggcggccagtacttggcttcgatcaacgacgccaccgggtacaccgcctgttcacggctgtacggatggctccattcgcccaccagttcagcggcagtgtgcggcgcgtttttcagcgggttgtcgtccttgtccagcgtgccgttttccaccgcgcggatttcttcgcggatggcgatcatcgcgtcacagaagcggtccagttcttccttggattcgctttcggtcggctcgatcatcaaggtaccggctaccgggaacgacatggtcggtgcatggaagccgaagtcgatcaaacgcttggccacgtcgtccacgctgatgccgctgctgtctttcagcgggcgcaggtccaggatgcattcatgggcgaccaggccattgctgccggtgtaaagcaccgggtagtgctcttccaggcgacgggaaatgtagttggcattcaaaatcgccaactgcgaagcgcgcttgaggcccgcgccgcccatcatgctgatgtacatccaggtgattggcaaaatgcttgcgctgccgaacggcgccgcgcacaccgcgccttccttgcgttccatggccgcgtggccgggcaggaacggcgtgaggtgcgacttgacgccaatcgggccaacgcccgggccgccgccgccatggggaatgcagaaggtcttgtgcaggttcaggtgggacacgtcgccgccgaacttgcccggtgcgcacaggccgaccatggcgttcatgttggcgccgtcgatgtacacctggccgccgttgtcgtgaatgatgccgcagatttcgcggatgccttcctcgaacacgccgtgggtggacgggtaggtgatcatcagcgcggcgaggtgctcgcggtgctcgatcgccttggcgcgcaggtcttcgatgtcgacgttgccacgcgcatcgcacgcggtcaccaccacacgcatgccggccatattggcggtggccgggttggtgccgtgggcggacgacgggatcaggcagatatcgcggcgctcatcaccacggctctggtggtaggcacgaatggccaacaggccggcgtactcgccctgggagccggcgttcggttgcagggagatcgcgtcataaccggtggcggcgcagagcatggcttccaggtccgaggtcagctccaggtagccggtgctttgctcggccggggcgaacgggtgcagggcaccgaactcggcccaggtcaccgggatcatttcgctggcggcgttgagcttcatggtgcacgagcccagcgggatcatggtgcggtccagcgccaggtccttgtcggccagcttgcgcaggtagcgcatcagctcggtttcagagtgatagcggttgaacaccgggtggctgagcacgggcgactggcgcagcagggcggcgggcagggtgctttcagtctcggcgaacgctggcagggccttgccgtcggcgaagatcgaccacagcgtttcgatatcggcttgggtcgtggtttcgtcaaccgaaacgcctaggcgctcaccgtcgaccacacgcaggttgatgcgctgggcacgagccttgtcgtgcagggcggcggtgtgggcaccggtgttgagggtgatggtgtcgaagaagttctgttgctcgaccttcaggcccagggcggtcaagcctttggccaggatcgcggtcagctggtgcacacgcccggcgatttgggtcaggcctttggggccgtggtacacggcgtacatgctggcgatgttggccagcagcacctgggcggtgcagatgttcgacgtggctttctcgcggcggatatgttgctcgcgggtctgcatggccaggcgcagggccggcttgccgaaacggtccacggaaacgccgaccagacggcccggcatgtcgcgcttgaacgcatccttggtggagaagtacgccgcgtgcgggccaccaaagcccagcggcacgccgaagcgttgcgcgctgccgatggccacgtcggcgccgaactcacccggcggggtcagcagggtcagggccagcaagtcagcagcaacggccaccaaggcgttggcggcgtggaagcgttcagtcagtgcgcggtagtcgaacacatcaccgttgctggcggggtattgcagcagggcgccgaagaacgggctgacgtcggtcagctcgcgctcgtcgcccacgaccacgtcaatacccaatggctcggcacgggtgcgcagcacgtcgagggtttgcgggtggctgtggaccgaggcgaagaacgcgttgctgcctttgttcttgctcaggcgcttacagaaggtcatggcttcggcggcagccgtggcttcgtcgagcagggacgcgttggcgatcggcaggccggtgaggtcgctgatcagggtctggaagttcagcagcgattccaggcggccctgggaaatctcgggctggtacggggtgtaagcggtgtaccaagccgggttttccagcaggttgcgcaggatcggcgacggcgtgtggcagttgtagtagccctggccgatgtaggttttgaacagctcatttttgctggcgatggccttgattttagccagggcctgggcttcgctcaggccgtcttccaggccgagcacgctggtgcccttgatgctttccgggatcacgctggcgctcagggcttcgagggaatcaaagcccaggcttgcgagcatttgctgctcgtcttcctggcgcgggccgatgtggcgggcgatgaattcgttggcggtggtcagttgaacagtcatggcgcgctcctcaggcttcagcgttggctttgatcaggcggtcgtaggcatcctgatccaacagcttagccactgcaccggcatcggccggtttaaagcggaagaaccagccttcgcccatcgggtcttcgttgaccagctcagggctgtcgctgagtgcgtcgttcacctcaagcacttcaccggtcaggggcatgtacacgccactggcggctttgaccgattccacggtggaggcttcggcgcctttctcgtattcctgcaactccggcagttgcacgaaaaccacatcacccagcgcgttctgcgcgaaagcggtgatacccacagtgacgctgccgtcagcttcggcgcgcatccattcgtggtcttcagtaaaacgcaactcgctcatggaaactcctcagggccagattcgtctggtggacgggattgggataatggggagttacaaagcaaaattgcggccaatattaattaagcgttgttaatcaataagttagtgagttttgttatggcgttataacttttctctgtaacgatttcgctacggtcgaacaggcgaaaaaaagcctatgtggatcaaagccttgcatggcgcgcaaaaagcagggttgtagcgatatcgttacgctgtagcgctttcagtacagccgatgtcgttctcagaccagaacctggaatgcatacactttgggagctggcttgcctgcgatagcggtttgcctgatccaccgctatcgcagcgatgcggcgacccgacaagccagctcccacatttggactgcgtcgtgtcagttaaggcttgtttgggatgccgtatttgcgcaagcgatgggcaatggcggtgtgggaggtttgcaggcggctggcgagttggcgggtcgaggggtagctggcgtatagcttttccagcaattcgcgctcgaagtcttccaccgcttgttccaggctgtcgacttcgccatcgctctggcgcgccaccgaggtgccggcgatgtccagatcaccaatgtccaccaacgtgctttcgcagatcgcagccgcgcggaagatcacgttctgcaactggcgcacgttgcccggccatgagttgcccagcaaggccgggtaggtgccgggtgccaagcggcacaccgggcgctggatctgcgcgcaggcttgctgcatgaagtagcgcgcgagcaacaggatgtcctggccgcgctggcgcagcggcggcacttcgacgttaagcacattgaggcggtagaacaggtcttcgcgaaaggtgccttcgctgaccatcttttccaggttgcggtgagtggcgctgaggatgcgcacgttgaccttcacttcgcggtcgccaccgacacgtcgaaagctgccgtcattgagaaaacgcagcaacttggcctgcaagtatggcgacatctcgccaatctcatccagaaacaccgtgccctggttggccagttccatcaggccgggtttgccaccgcgctgggcaccggtaaaggcgccgggcgcataaccgaacaattcgctctcggcgaggttctccggcaatgctgcgcagttcagtgccagaaacggcgcactgtgccgcgcgctgatggcatggcaggcccgcgccaccagctctttgccggtgccggtttcgccctggatcaacaagggtgcatccagcgccgccacacgctgcgcacgcgccttgagggtacggatcaccggcgactcgccgagcagcgcatcaaagccttcggcatggtcgtggtgcaacgccgaaagctgttcgccgatgcggttgggttggtagagggtgagcagggcgccggcgtcggtgatcggcgtggcgtccagcaacagggtttggccgttcacactgatctcgcgaagcgccaggcgaaagccgtgttccagcaacgtatcgagcagcgtcgggtcgttgaacagctcgctgatgctttccccggctggctcgcggccgtagagggcgatcagcgcggggttggccagcaggatcttgcctgcgctgtccagcgccagcaccgggtcggtcatggcggccagcagagcgtcgagttgcaggtggcggcgttggccgggaaggatgtccaccaccgtgacggcctgcacgccgtgcacgctgaacagggcgtcgcgcagttcttcgaggacatcggcgctgagcgttggcgcgtcgatgtagacgttgggcggcaccatttccaccgcatccaggttgagattgcgcccaccgagcagggccaggacttcctgggtaatgccgacgcggtcgatgaagctgacgtggatacgcatggggtggcgtttggttctgggatgcggagggtcgccagtatgccttgcagacgatggagatcaaaatgggggagctggcttgtcgggtcgccgcatcgctgcgatagcggtgggtcaggcaacatttctgtcactgatacaccgctatcgcagcgatgcggcgacccgacaagccagctcccacaggggatttgcggtgttactactccaggtgttcgggcttgatcgggtcgccggacttcacatccagttgatggcgcacatcctcaaacatcaaatcgtattgtttgtgcatcgcgccattgagcaccgcgatctttggcatcccgtacttctgcgcgatgttcatcgcatgccgggcaaagtcgaacgcctggtccttgggcagaaagaactcttccttgaggtctttgccctgcaccgagccatggagcttgaacagcatccccttgccttccttggggtcctggctgacttcgtaatcgatgcacaggttgtagctgtagtcctgggcattcagcgcgtgacgttcgacgtgcaagtgacccggttcaaaggtggccataggcgtttctcctctactgcttcactggtaggtgatgccaggtgttgccgtgctgatgcgtgtgccggcgcggccctggacgatggcttcgatgtccgagagtgaaccgatgactgcggttttgccagtctgacgggcgaactcgcaggcggcctggaccttggggcccatggagccggcggcgaaaccgagcttttcgatttcgtcggggtgcgcctggccgatggccttctgcgtcggcttgccgtagtcaatgaaggccgcgttgacgtcggtggcgatcaccagtaaatcagccttcaattgaccggccagcaaggaagagcagaggtctttgtcgatcaccgcttcaatgccttggagcttgccgtcctccccgtacatcgtcgggatgccaccgccaccggcgcagatcacgatgctgcctttttccagcaaccaggtgatcgggcggatttcaaagatgcgtttcgggcgcgggctggcgaccacacggcggtatttgtcgccatcgggcgcaatcgcccagcctttttcagcggcgagcttttctgcttcagccttggcgtagaccgggccgatgggcttggtcgggttcttgaacgcagggtccttggcgtccacttccacttgggtgagcagggtggcgaagggcacttcgaagtccagcaggtttcccagttcctgttcgatgatgtaaccgatcatgccctcggtttcagcgccgagcacgtccagtgggtaaggcgaaacctgggtgtaagccgccgcctgcaacgacaacaggccgacttgcgggccattgccgtgggcgatcaccagctcgttgcctgggtgaatcttggcgatctgttcggtggcgacccggatattggcgcgctggttgtccgcggtcatgggttcaccgcggcggagcagggcgttaccgcccagtgctacgacgatacgcatacaaatgtccttctgaaaattcaaatgaaggaacacggtcagtgtgggagctggcttgcctgcgatggcatcaccctggtctgcctgacagaccgagatgcctgcatcgcaggcaagccagctcccacataagcccagctcccacactgagggtgttcacacagtgaaagttagatatccgccaacgccgacaccagaatcgccttgatggtgtgcatgcggttttccgcctgctcgaacgcgatgttggccggcgactcaaacacgtcctccgttacctccacgccattggccaggttcggatagcgcgccgcaatgtccttgcccactttggtttcgctgttgtggaacgccggcaggcagtgcatgaatttcacgcgcgggttgcccgaggctttcatcatcttggcgttgacctggtagggcagcagttgctcgattcgctcgtcccacgcttccaccggctcgcccatcgacacccagatgtcggtgtggatgaagtccacgcctttgaccgcctctttcgggtcttcggtgatggtgatgcgtgcgccgctttcctcggcaaaggcctggcactgcttgatgaaatcttcatggggccacagggctttcggtgcgccgatgcgcacgtccatgcccagcttggcgccgatcatcagcagcgagttgcccatgttgtagcgggcgtcgcccaggtaggcgtagctgatgtcatgcagcggcttgtcgctgtgctcgcgcatggtcagggtgtcggcgatcatttgcgtcgggtggaattcggcggtcaggccgttgaacaccggcacaccggcgaacttggccagctcttcgacgatttcctgttcgaagccacggtactcaatggcatcgaacatgcggccgagcacgcgggccgtgtctttcatgctttccttgtggcctatctgcgacgacaccgggtcgatgtaggtgacgtgggcgccctggtcatgggccgccacttcaaaggcgcagcgggtgcgcgtcgaggttttttcgaagatcagcgcgatgttcttgcccttcaggtgcggacgctcggtgccggtgtatttggcgcgtttgaggtcgcgggacaggtccagcaggtaatgcagctcgcgggtagtgtggtgcatcagcgacagcaggctgcggttgcgcatgttgaaagccatgatggatctccttagtagtcgattgggtcgcggatgatcgggcaggtcatgcagtggccgccgccacgcccccggcccagttcaccggcactgatggtgatgacttccaccccggccttgcgcagcagggtgttggtgtaggtgttgcggtcgtagccgatcaccacgcccggctccacggccaccacgttgttgccgtcgtcccactgctcgcgctcggcggcgaagctgttgccgccggtttccaccacgcgcagggctttgaggttgagcgcggcggccacggtgtcgaggaagttggttttctcgcgctggatgtcgatgccgtggggcttgctctcgtcagggcgcagggtgaacgcgacgatttggttgaccacttcggggaagatggtgaccaggtcgcggtcgcagaaactgaacaccgtgtccaggtgcatcgccgcgcgggatttgggcaggcctgcaacgatcacgcgttctaccgccttgttcttgaacaggttgcgcgccaattggccgatggcctgatgggacgagcgctcgcccatgccgatcaacaccacaccattgccgatgggcatcacgtcgccgccttccaacgtggaggcgccatgctcttggtcggggtcgccgtaccagatctggaagtccgcgttggtgaactccgggtggaatttgtagatggcgctggccagcaaggtttcctggcgccgcgccggccagtacatcgggttgagcgtcacgccgccgtagatccagcaggtggtgtcgcgagtgaactgggtgttgggcagcggtggcaggatgaaactcgagtggccgaggaaatcgcggaacatctcgatggccttgcccccgaagctgctcggcaggtcatcggccgagacacccccgatcaggtactcggcgaccttgcgcggttccaggctgcgcagccacgagccgacttcatcgaccaggcccaggccgaccgtgttggcggtgatcttgcgttgcaggatccagtcgagcgcttcggggatggcaacgatgtcggtcagcaggttgtgcatttccagcacatcgatgtcgcgttcgcgcatcttggtcacgaagtcgaagtggtcgcgcttggcctgggccacccacagcacgtcatcgaatagcagttcatcgcagttgttgggggtcagccgctggtgggccaagcctggggagcacaccatgactttgcgcagtttgccggcttcggaatgtacgccgtacttcactttttccgtggtcattacagatcctccagtgaacaaaagttacagagtcaggaagccgtcgtagaggccgtaggcagccaccagggcgccaatgaccactgcggcgaaaatcagcttctcgacgttggtgaaaaccggtttgcccagttcacgcttggccttggcgaacagaatcgcgccgggggcgtagagcagggcggagagcagcaggtatttggtgccaccggcgtagagcagccagaccgcgtagatcagcgcgatggcaccgatgaacaggtctttcttgcgttcgcgcagggcgttttcgtaggtttcgccacgcaccgccagcaacagggcgtaggccgccgaccacaggtaaggcaccaggatcatcgaggtggcgaggtagatcagcgacaggtaggtgctggccgaaaacagcgtgatcaccaagaacagctgcaccatggcgttggtcagccacagggcgttgaccggtacgtggttggcgttctccttgcgcaggaactcgggcatggtgtggtccttggcggcggcgaacatgatctccgcacacagcagcacccatgacagcagcgcgcccagcaaggaaatgatcaagccgacgctgatcagcaccgcgccccaatggcccaccacatgctccagcacggtggccatcgacgggttctgcaacttggccagttccggctgggtcatgatccccagggacagcacgttgaccagcatcaggaacagcagcacggtgataaaaccgatcacggtggctttgcccacgtcgctgcgtttttccgcgcgggacgagaagatgctcgcgccttcaatgccgatgaacacccacacggtcaccagcatcatgttgcgcacctggttcatcacgctgcccagatcggggtttttcacgccccagatgtcagcggtgaagatgtccagcttgaacgcgaacagcgcgatcaacacgaacagcaccagcggtaccactttggcgacagtggtgaccaggttgatgaacgcggcttctttgatcccgcgcagcaccagaaagtgcacggcccacagcagcaccgaggcgccgatgacggccgcaggcgtgttgccttcaccgaagagggggaagaagtagccgagggtgctgaacaagagcacgaagtacccgacgttgcccagccaggcgctgatccagtaaccccaggcagacgagaaacccatgtaatcgccaaaaccggccttggcgtaggcatacaccccgccgtcgaggtcgggcttgcggttggcgagggtctggaacacgaaagcgagggtcagcatgccgatggcggtgatgacccagccaatcagcacggcgccgacgtcggcgctggcggccatgttttgcggcagagagaagatcccgccgccaatcattgaacccacgacaagtgcaaccagtgcgcccagtcgaagttttccgggagtttcagacattgcatgactccaatgcaggagaagagagaccacagaataattccgtgcgctaatcaaacagctgactcagatcacttcattggcacattccattgtgaattaatgacttaggctgaaaacctgtgggcgatataaaacctcgcaaaggctcgttccagagccttatgcccgttgtggttaattaattagtcaggggtatggacgtttgaagctagtccgtttttccgaatgtgcaaactttttccataagccctcgatttagtggctgactggcaaagtgctagctttatttaaatttcaaataaacctaaacgttcttaattgtcatgcgattaagttatgagcgtgtcagatttagttgccctgcctgataaacgctacactcggctggatatttagttgagtacacagttgttagctcaatcggttttacagtcaggagtgtgcatgtctcaaccggtccagaaactacgccttggcgccctgattgccttggtggtcggctcgatgattgggggcggtattttttccctgccgcaaaacatggccgcgcgcgccgaggtgggcgcggtgttgatcggttgggcaatcactgcggtcggcatgctgaccctggcctttgtgttccagaccctcgccaaccgtaagcccgaactcgattccggggtgtatgcctacgccaaggccggtttcggtgactacatggggttctcatcggcctggggttattggatcagtgcgtggatgggcaatgtcggctacttcgtgttgctgttcagtacccttggctactttttcccggtgttcggccagggcaatacacccatcgcgattgcctgcgcctcgctgctgttgtgggccgtgcattttctggtgctgcgcgggatcaaggaggcggcattcatcaaccaggtcaccaccgtggcgaagatcgtgccgctgctgatgtttatcgtgatcgccgccgtggcattcaaagccgacattttcacccgggacatctggggccttggcaacccgagcatgggaagcgtggtggaccaggtgcgccatatgatgctggtcaccgtgttcgtgtttatcggcatcgaaggtgccagtgtgtattcggcgcgggctgaaaagcgctccgacgtgggccgtgccacggtgatcgggtttctcggtgtgctggcgttgctggtgctggtgaacgtgctgtcgctggggatcatgagccagccggaactggccaatctgcagaacccgtcgctggcgggcgtgctggagcacatcgtcgggccatggggcgccctgttgatcagtgtcgggttggccgtctcgctgctcggcgctttgctgtcctgggcactgctgtgtgcggaaattctctacgccaccgcccacgacaacaccatgccggccttcctcaaacaggagaacgccaaccaggtgccggtcaatgctctgtggatgaccaacgtgatgatccaggtgttcctggtgatcacgctgttttcccaaagcacctacaccaccctgatttacctcgcgtcgtcgatgattctggtgccttacctgtggtcggcggcctacgccgtgctgctcagcgggcgcggtgaaacctacgccggcgcgcaacgccggcgcgtgaaggatttgctggtggggctggtcgccctgatgtatgcggtgtggctgctctacgccggaggcctgaaatacctgctgctgtcggcgctgctgtatgcgccgggcgtcatcctgtttgccctggccaagcgcgagcaaggcctgcccttgtttacctccgtggaaaaaggcattttctgctgcgtggtcgcgggcgccgggctggcggcgtatgggctgtatagcggggtgttgtcgttgtgagactggcgtatcagccgccctacgactgggcggcaatgttgggttttctgtcgatgcgcgcgattggcggcctggaaaccgtggccgacggcgtgtaccggcgcagcatcagcgttgcagggcagcatggctggatcagcgttgcgccgggggcgggggactggttggaagtgggcgtcgattttcctgacaaggcagcctttcccgagattgagcggcgcctgcgcattcagtttgatctggatgcacagcctcaggcgatcagcgcgcaattgtcccgcgatcctttgatggcgaaactcgtggcggcccgtccaggcttgcgagtgccgggaacatgggacggtctggagctggccattcgcgcggtgctgggccagcagatcaccgtggtggcggcgattcgcctggcgggcaagctggtggcgcactacggccagccgctggagacgccgcaccctggcatcacccatgtattcccgacgcccgaggtgctggcgatggcggacctggccacgttgggcatgcccaaggcacggggccgtacgttatcgggcgtggcccaagcgttgctggatgaccctgaactgtttgagcccaaagccagcctgaaggaaggcgtggcacgcttggtggtcttgccggggattggcgactggacggcgcagtacatcgccatgcgccagatgcgcgaggcggatgcgtttgcgtcgggggatatcggcttgatcaatgccttggcagcgctggaaggcgggccggtttcggcgcggcagttacaagcccgggcagaggcttggcggccgctccgggcttatgcggcgcagcatttgtggacttcattgagccggggagattgaggtggtcgcactggcctcatcgcaggcaagccagctcccacagttgatgtgtgaatacgggtagatgtgaggtggctggactggcctgattgcaggcatgccaggtctcagatttgatgtgtgaatacggtcaaatgtgggagctggcttgcctgcgatagcgatcttcagatcaccactgcgcccggtgtgaccccaattcccccgccgccaaatcccactgcaacggcgtgccgctgatggtcactggcgccagcaaccgatgagcctggccccacggcgtctgctccaccaccaagccttgatcgctcgcctcttctgcccgcaacgccgcttgttccggcacctggccaccttccaccagcaacttcgccgtgcgcgccaacgacagccgcgccgacccgccgcgcccggttttcaaacgttcactcaacgcctgaatcgccgccgccgccatcaaatacccggttgcatgatccagcgcctgcaacggcagtggcaccggtttatccgagtttttccaggccatgcccgcatcggctatcccgctgctcatctgcaccaggctgtcgaagccgcgccggttgcgccacgggccgctccagccgtaggcgttgaggctcacgtcgatcaggccgggggcgagggtttgcagttcggccgaggtgtagcccagttgctccagggcatcggcgcggtagccgtggaacaggatgtcggcgtctttgagcaaactttcgaaaatctgtcggccttcgacgcttttcaggtcgaggcgggcgcaacgtttacccaaggtcatttccggcaccacgcctggctcgttccacgtgggtgagtcgatgcgcagcacgtcggcgcctaacccggcgagaaaacggctggctaccgggccggccaatacgcgggttaaatcgagcaccttgatacccgccagcgggcgcgcgactgaaccgagccagggtttgtcggccaatgttgcaaatgtctcgcgctgcaccagtgcctcggcgtttaccgccaagccctgcggatgggttttccaggcctgccacgagcgcatctgcgccgcgcaaccgcccgcatcgacgactgcctgctccagttctgcggcattccacgcggcgactttgctcgccatgtgtgcgcggtcggtcaccttgcccagcacgcgctcggcggcatcacggtggtggggcgcgttggtgtgcaagcgaatccagccgtccgcgctggcatagtcgccggccactgggtcccacagcggcggcacttgccagccgacagggcgaatcgacgaggaaaaccagaaggaggcgaggcgccggtccacgttgaccgtcggcaggcgcccggtctgttgctggatcaactgcgcaaccgcctggccggcggcgccaatgctggcgatggccaggtcggtcacggcgaaggtcgaaggcagggcgccggccgaggtttgaggcagcggggtgtggggtaaagcgagtgcggcttggatgggtgtcagcaggtcagtcatcaaaggccctccgtaagagaagggccactatagaagatcatcacaccgctgtgacaactcccggttccaacggcaggtcgatgctggcgataaaaccgccgtccgggtgattggccagggtcaggctgccgccatggcgttctgccgcgcgacgggcgatggccaggcccaggccgtgaccttgggcgacttggccgggggcgcggtaaaacggctcgcccaattgggtcaggtgctcggcctcaacaccggggccgtggtcgcgcacgctgatcagaatgcgttcgccgtggcgttgggcctgcaactcgatgggctggcccagcgggttgaagcgctgggcgttgcgcagcaagttatccaccgcgcgctcgatcatggtcggccagcctttgatgagcaactcgggttcggccgtcaactgtacaagctgctcgggggcgctgagttgggcgtctttttgcagggtcttgagcagcggggtgaggtccatgtcttcggcgctggcgttgtcggcatcgacgcgggcgagcaccaggatttcactgatcagtgcttccaggcggtcgcactcgcgggtcaggcgtggccaaagacgctcgcgctcttcggggccggcgcgttcggccagggccagggcgatacgcaggcgggccagcggcgagcgcagttcgtgggacacgtcgcgcaatagctggcgctggctgccgatcaggctttgcagtcgcgcgcccatacggttgaagtcggtggcgagcacgccgaattcatcgcggcggttggccaattgcgccaggctgttttgttgataggtggtctggccaaggtcatgcacggcgccccgcaggcggctgagcgggcgtgtgatggacagtgtgacgagcaggctgaacagggtcagcaccaccagcgcaatcgccagcgcgcttaacggccacatcaggctgctgcggtgccaggcgtcgagttccgggtgaggaatgcgatagatcagcaggtaggtgtcaccggttttttcgctggtgtactcggcggtcaggcgccgccagggcaggtggccgtcctggctgtcattttgccgggcttcaaaagcggccgcgcggcgcgggaaggtgccgcgtaccaccgggtcgccggtttcgttcagcacttgcacgtcaatgtggtattggcgtttgcgctgctgcagcaactcctgggcggcgtcctcgccctgggcttcgtagagttgggtccactcttgcgccaggttgttgaggccggggtggcggctgagaatccaggcgtcctggttgagcatgtgcccaagcaggatcgacaacccggcaaccaaagcgatggccagccagaagctggccaggatccgccagaacaatgaacgcacaggaaaccctcaaacaggaaaagcccagtggcgaaggccactgggctgggggaacgctagatcattattgcgctttttgcggttgctgggctttccaggcctggaattccttccattcggcgcggcgctcggcttgttttttcacgatctcgtcgaatttcttctgttgatcgggtttcagcacggcacggatgtcggcctgggttttctgtttgcctgcggcgatttcatcctgcatggctttctggtcagcggcgggcagtttgtccaggtactttttgaccaggtctttgcgagcgtgccactggtcacccatcagtttgccgatctgctggcgctgttctttggtcaagtccagctgacggaatgggccgccgtgaccgcgcggaccgtgttcgccaccgtggcccgggccacccatcatgtggccttccgggccgcccatcgggcctgggccgtctggcgctgcggccatggcaacggtgggcagggcagcggcgaacatcagagcgataagggtcttgcgcatggtgattctcctgtctctattccggtgagtccggatgtgagtagattaaggagatagaggtcagcggcggtcaggggagggtaaagcttgggtaaagaggatttatatcgaggctgacaaaacccttgagaccaaggagatcaagtgtgggagctggcttgtcgaatcgtcgcaccgctgcgatgcaggcagctcggtctgtcagttgaacctgggtgatgccatcgcaggcaagccagctcccacagaaggttcagaggctgtagtagtagccgcggctgcgcaacgccacgattcgcggccggccatccgggtgcggaccgatctttttgcgcaggttgctcacgtgcatgtccaggctgcgatcataaagggtcagcttgcggcccagggcgatctgcgccagttcctgcttgtccagcggctcgccgggctggcgcagcagggcttccagcagacggctttcggagacggtgagggcaaactcctgctcgtcgatgctgaccacgccacgcaccgggctgaaacacaggtcgcccagctccatctgcgtcgacaccgccgccgggtggctgcggcgcaacacggcacgcaggcgcgcagtgagttcacgcggatcgcacggcttggccaggtaatcatcagcgcccaattccaggccgagaatacggtccagcggctcgccacgcgccgagagcatcagcaccggcaagtccgggtggtcgttgcgcaattgcttgagcagctcaaggccgctgccgtcgggcagcatcacgtcgagcacgacggccgcgggggcgctgtcggccaaggctttgcgcgcgctcaagccgtcatggcaggcgcgcacttggaaaccttcctggctcaaccaactggtcagcagctcacagagctcctggtcatcatctatcagtaacagctcgctcatgactcactcaatttagccattgtcgacggcgacggtgcccaccgctggcgaagatgccacacagcagggcgatcagtgcgacggcacctccggtgacaaaccactgttgttgctcggtcagccagtgggtgaaggtgccgccctgtgcttctttgagttgctgggccaggcgttggttctcctggcgcaagcgattcagttgggcgctttcgcgggcggtgtccgcactttgcagttgcttgctcagttcttcgcgcagccgctcgctttctttcaagcgttgctgcaactcggtgatctggccgccggcactcaaggacaaaggcgtggagctgccggtgttcgagggttcttcagcctgggccgtggccccgatcgttaacactgccaacagacacaactgacgtaagcgcatcggaactcctgattccacacgaatattcagaacgttgtcggcaggttaccgggaataatgagccattaggagtacgccgcacgcaataggttcggcgttccaggttcaaggcaggacttgtttgaacggcttgaccgagacatccgcgtagacgcctgctgcgatatacggatccgccttggcccaggcctgggcatcggccagggaggcaaactcggcgatgatcaggctgccggtaaaaccggcatcgcccggatcgttgctgtcgaccgccgggttcgggccggccagcaccagccggccgtctgcttgcagcactttcaggcgctcaaggtgagccggtcgcacggacaggcgtttttccagcgagttggcaacgtcggtagcaacaatggcgtagagcatgtcagtcctcggttttcggcgtggtagggtcggtgtcatgcaggtggcgcgacaggtagatgccctgggcgaccaggaacaacacggtcatgcccaggctgccgaagactttgaagtcgacccagtagtcctggaaagtgaaggccacgaacaggttggcggcaccgcagaacaggaaaaagacgatccaggccacgttcaggcgtacccagaccggctccggcagggtcagggcatggcccatgatccgcttgatcagcaggcgatcaccgatgaagtggctgccgatgaacgccagggcgaacagccagttcaccaccggggctttccatttaaggaaggtttcgctgtggaaggccagggtcaggctgccgaagaccaggcaggcgaccagggtcagccattggcttttttcgagtttgcgctgggagatgaagatcgcgccgtagaccacgacagagctgatgatcagcacggcggtggcgctgtagatgcccccgacggtcagctcatggccggccaggtcgatgacacgagggtcgagtttataaacgatgaaaaacagcaacagcgggatgaagtcgatgaattgtttcacagtaagagccagaagctggatgtggcggcataataacaaacatccttggtagcgaaagcgccagctgacttgaggttacatacttccgtgaatgttgatttgcactgccacagcacggcctccgacggcgccctggcgcccgcggtactggtcgcgcgtgcgtttgaaaaaggcgtgcgagtcctgtcgttgaccgaccacgacaccctcgaaggcctcgatgaagcccgcgaagccgcgcaggcactgggtatgcaactggtcaacggggtggaattgtcctgcacctggggcggcgccaccattcatgtgctcggctacggtttcgaccagaaggctgcgccgctggtggcggccatcgccaatttgcacgatggccgctggctgcggtccgaagaaataagccgcaagctcagccttaaaggcatgccgggtggcctggaaggtgcccgtgccgtccagcaggaactgggtgacagcggcaacgcaccggcccggccgcactttgccgactggatggtgcgtgaaggctttgtcaaagaccgtgccgaggcttttcgcaagtggctgggcgccggcaagttgggggatgtgaaactgcattggccgaccctggaagacaccgtcgagaccctgcgggcctccggggcctgggtcagcctggcgcacccctggcattacgatttcacccgcagcaaacgtcgcaagctgatcagcgactatattggagcgggaggccacgcaatcgaggtggtcaacgggcatcaacccgccgaacaggtcggcagcctggcgattcttgcccgcgaatttggtctgctggtcagtgccggcagtgattttcatggcccgggcggctggtccgagattggcgagtaccgccaggtcccggaagatctgccgctcttgtgggggcgattcaagcatgaccccattactgccaccgtctgaacaggtagaacacgtgagtcaattcttccagattcatccggaaaacccgcaagcgcgcctgatcaaacaggccgtggagatcatccgcgccggcggcgtggtgatctacccgactgattcctcctacgccatcggttgccagatcggcgacaagggcgcggtcgagcgggtcagacgcttgcgtgacctggacaagaaccacaactttgcgttgatctgcagcgacctgtcgcagcttggcttgtttgccaaggtcgacaccggcacgttccgcctgctcaaggcccacacgccggggccctacaccttcattctcaacgccacccgcgaggtgccgcgcctgttgctgcaccccaagaagcgcaccattggcctgcgcgtgcctgagcacccgatagccctggcgttgctggccgagctgggtgagccgctgatgagcgtgtcgctgatcctgcccggtgaaaccgagccgttgtatgacccgtacgaaatgcgccaattgctggaaaaacaggtcgacctgatcatcgacggcggctacggcggcaacaaggcttccaccgtgatcaacctggccgacggcgagccggaagtggtgcgcgtgggctgtggcgacccgacgccattcatggtcgaggcctgaatgtcggtcgtggaaaccgtcgacagccaggcgggcgcccagcaggaactgccctttgccatggtctacggccaggccgtcatggaaatgccgctggacttgtacatcccgccggacgctctggaagtctttcttgaagccttcgaaggtccgctggacttgctgctgtacctgatccgcaaacagaacatcaatatcctcgacatccccgtggcggaaatcactcgccagtacatgggttatgtcgagttgatgcagtcggtgcgcctggagctggccgccgagtacctggtgatggccgccatgctggccgagatcaagtcgcgcatgctattgccgcgctcggagtctatcgaggcggaggaagatgacccgcgcgccgaattgattcgccggctgcaagagtacgagcgcttcaaggctgccgccgaaggcattgacggtttgagccgggtcgggcgcgacgtggtcgtgcccaagcttgacgcccctgaagcccgtgcgcgcaagctgctgccggacgtgagcctggaagaattgctgatgtccatggctgaggtgttgcgccgtggcgacatgtttgaaagccaccaggtcagccgcgaggcgttgtcgacccgcgagcgtatgagtgatgtgctggagcgcctcaaaggcggcggttttgtgccgtttgtagagctgtttaccgccgaagaagggcggttgggggtggtggtgacctttatggcgatcctggagttggtgaaggaatccttggtcgagctggtccagaatgagccttttgcggctatccacgtgcgggcgcgagccgaataaagagctgaatcgatgaatttgactgaaccccgcgaactggccccgctgctggaggcctttctcctggcctcgggcaaaccgcaatctctggagcgcctgttcgaactctttgaagaagccgaacgccccgagccgccggtgttcaagaaggcgctggagattctgcgcaagtcctgtgacgggcgtgcgtttgagttgcgtgaagtggcctcaggttaccgcctgcagatccgtgagaaattctcgccgtgggtaggccgcctgtgggaagagcgcccgcagcgttattcacgggcgatgctggagaccatggcactgattgcctatcgccagccgatcacccggggcgaaatcgaggacgtgcggggcgtagcggtcaacagccatatcgtcaaaaccctgctggagcgcgagtggatccgcatcgtcggctaccgcgatgtgcccggcaaaccggcgatgttcgccaccaccaaagtgttcctcgaccatttcaacctgaaaaacctcgacgacctgccgccgcttgccgaactgcgcgagatggaagccgagccggtgctggattttgacgacgcgcccgtgcccgccagcttgcaggaactggccgacgccacggccgagccggaagagccgaaggacgaaaccagtttccacaccttgttgctggagctggacgacatggagcagggcatcaagaccgactttgatgatttgctgcgtgatggagcggttgagacagaaagccaggtgaacgttgaggttgtggctgaagtcgaagttgaaccggagccagagcctgaagaggacgtccttggcgttgccgaagcccgcgaaaaactcctggccgccgtcgccgcccttgaacagccgccgctgagcgacgaagaagacgaagcccgcgcgctggccgaagccatcgaggccgagcgccgccagttcgaagactgacccgatctaccaaacaccgcaaacccatgtgggagctggcttgcctgcgatggcatcaccacggtttaaccgcaagaccgaggtgcctgcatcgcatgcaagccagctcccacagaatcgccagcttattgggaggatccagatgagttccaccaaagacccctgcatcagcatctgcaaattcaccgatgacatctgtgtaggctgtggccgcagcaagcgcgaaatccgtgcgtggaagaagctcgacaaggtcgacaagcgcagtgtcctggcgcaagccgaactgcgcctgctggccctgggcgccaccggtcggcggaaaagcaaatgagcctgcactaatcggctagtctttgatgcgcaacgcgcgccatgcgcgtatgattcgcgaccctttgccgacctattcggccaaagccccgctttcaacactcttcaggccacgcctgaatcgacccaccgggaggtgcttaagatgaacgacaaagaccagaacgacagccaggaaatcggcccagcaggcgaaaaactgcaaaaggtgctggcgcgtatcggcgtgggctcgcgccgcgacgtcgaagcctggatcacccagaagcgcatcaaggtcaacggcgtcgaggctaccctcggccagcgcgtcgacctgcatgacgcaatcaccatcgatggcaaggtcatcaagcgtgaagaggccgccgaatcggtgcgccgcgtgatcatgtacaacaagcccgacggcgagatctgcacccgtgacgatccggaaggccgtccgaccgtgttcgacaagatgcccaagcccaaagaaggccgctggatcaacatcggccgcctggacatcaacaccaccggtttgctgatgttcaccactgacggtgagctggccaaccgcctgatgcacccgtcctacgagatggaccgcgaatacgccgtgcgtgtacgtggcgaagtcgatgacgagatgatcgagcgcttgaaggcgggcgtggtgctggaagacggcccggccaagttcaccgacatcaagcaggcgccaggtggcgaaggtttcaaccactggtaccactgcgtggtgatggaaggccgtaaccgtgaagtgcgtcgcctgtgggaatcccagggcctggtggtcagccgcctgaagcgcgtgcgtttcggcccggtgttcctgaactccgacctgccgatgggccggtggcgtgaaatgagccagtacgaagtcgacatcctcagcgccgaagtcggcctgaccccggttgccatgccgcagatgaacgccaagagcaaagacaagcttgagcgtatgcagcgtaaatcgtcgcgtcctgtggcccgcactgagcgtgttgcgcgcaccctgcgccctgcgttgaatgcaccggcgaccggcggtcgtatctcacgtgagccgcagatcgaaggcgagcgtcgcccaaccgcgccatcgcgtcaggaaggcgagcgtgcgccacgtgcaccgcgtccggccccggccggtggtcgcagcaaccgtggtgaggctgatcgcccggcggacaacgccagcaccaagcgcccggccaagccggccgcgaacaagcgccctggcccgaaactggtggcggacgagccgtcgggcaagcgccgtggcgcaccggcgggttccggtcagcgtcctggttttggtcgcaagaagccgcagtgatgtaagtgcagcacaaaaaaacgccaacccttgggttggcgtttttttttgcatcgaatttgaaatgcattcaagtgtgggagctggcttgcctgcgatgcaggcacctcggtttgtcaggcagaccagggtgatgccatcgcaggcaagccagctcccacacttgatctccattgttcatgaagtctgtgcctaaaacgcaaatcgcccatcaaatactggcttgtcatccagcgccaacacgccgctggcgaagatcaaatccaggtggtggctgcctttctggccgccgcccaggcccaggtgcaagccgcaatggcgctcttcaaagcccgcattgcgcgcatacaaatccttgaccccttcattggtgccaatccccaattcctccacgcggcgattcgacgggttggcattcaggtacttgttgaagtcatccgccagccccggcacgtcactggccacgctgcaaatggtcgagttttcgatccacagctccagcggtgattgcagcacgccgtatttgcgcgcaaacgggatggtgctgagaaaggtgccgacaaaccgcacctggccgttgatggcttcgctgtgggtggcgatttcgccgggcgccaggtcgtggttgccgacgccgttgatattggtccacttcttgatgctgctcagcggcgcctcgaggcgtgagccgtgcttgtcggtaaagctcagcacagtggcctgggacatgcgccggatcagcgtggcgttgaggtcggcaatacgctgcggctcgacgctgaaggtgtcgtagaagtagtcgccgtaatccttgaacagcagggattttttccagtgctcggccatcacgccttgcagggcgcggatgaagtccgggccttcggcgcgtgggttgggcaatgtcgaggagtcgtagagaaacaggtaaaggtcgctggcctcgatggcgtgggccagggtttcgctgggtgtcaggtccaggcgctggagctgaaagttgaaacgggcggcgctgccgtgggtgatctcctgggcgatggcgtcgtagcgctcggtatggcccagcagcacggtgggacggctcaggccgttgagggccgggtggtgagcaaggtagtagagaaagtgttcgacggcgcgggccttgtccatgacgggtgtccttctgtgccttgggtaagggggcaggtgccgtgcacaacacctgccggatgcctgccgggtattagaaaggccacatcgcggtgccaaacggcacaacggcgtcggcttgcatcatttcaacggcggcctcatgggtcggcgcttcaaaccaatcgtcgagttgcagttcggtttccaggtcgttttccagtgcttgcatggtgtatctcctagaggacggtgtttgagaacggcttgccaacgggcttcgctggcaagtgaaagaacctaggagagagtgtttcggaatgcaaaatatttattgacacggtttcatttggattttttgttctgttttttcggcgtgattttttattcagaaaaaacaacgggctacagagagcaatccgtcggaaatttccgactgacatttttccgttttctgacaaattcacatcggctgtaacgcttattttccgtgctgtaacgattaatttacgagaaagtcgccacattattgagcagtagcacgctgtaaggaatgcctgacagattgtcgcgtgcaccttcccggggcgtgccgaagctgtcgagcggtgtacaatgcgccgcgttttactgtgaccccccttgcgtacccacgcaaaaggccaagacccggggtgtacccagccctgatcactccgcctggccacgagccagacgggttcgatttcgtcacagataaaaacaaacaggtgacgcatgacccttagaaagacgctgtattcctggtgcctgcgctggggtttgagcggcgctgcgtgagtcgagattcaccgcagcaacgtgcattcaatatcctcaaaccttgcgtgagacccttttcatgagtggaccccattcctcttcaggcgagctgaaacgcggcctgaaaaatcggcatatccagttgatcgccctcggtggcgccatcggcaccggcctgttcctgggctcggccggggtgctcaaatctgccggcccttcgatgatcctgggctatgccatctgcggctttatcgccttcatgatcatgcgccagctcggcgaaatgatcgtcgaagagccggtggccggctccttcagccactttgcccacaagtactggggcggtttcgccggcttcctgtcgggttggaactgttggattctgtacattctggtgggcatgtcggagctgacggctgtcggcaaatatgtgcactactggtggcctgagatcccgacctgggtctcggcagcggggttcttcgtgttgatcaacctgatcaacctggccaatgtcaaagtcttcggtgaggccgagttctggtttgccatcatcaaggtcgtggccatcgtcggcatgatcgccctgggcagctatatgctggtcagtggcagcggcggcccgcaagcgtcgatcagcaacctgtgggaccacggcggtttcttcccccatggcgtcggcgggttggtgatggccatggcgatcatcatgttctccttcggcggcctggaaatgctcggtttcacggcagccgaggctgaccagccacgcaccgtgatcccgaaagctattaaccaggtgatctaccgcattctgattttctacattggcgcgttggtcgtgctgttgtcgctgacgccgtgggacagcctgctagcgaccctgaatgcgtccggcgatgcctacagcggcagcccatttgtgcaggtattttcgatgctgggcagcaacacggctgcgcatatcctcaacttcgtggtactgacggcggcgctgtcggtgtacaacagcggcacctattgcaacagccgcatgctgctgggcatggctgagcagggcgacgcacccaaggccctggccaagatcgacaagcgcggtgtgccggtgcgttcgatcctggcgtcggcggccgtcacgctggtggcggtgttgatgaactacctgatcccgcaacatgcgctggaactgctgatgtcgctggtagtggcgaccctggtgatcaactgggcgatgatcagcttctcccacttcaagttccgccagcacatgaaccgcaccggccaggtgccgttgttcaaggcgttgtggtacccgtacggcaactacatctgcctggcctttgtggtgtttatcctggtgatcatgttgatgatcccggggattcaggtctcggtgtacgcgattccggtgtgggtggcattcatgtgggtatgctactggatcaagaacaagcgcaaggcacaagcggctttgctcacacccgggacggttttggagtaggacccttccggtaaacagaaaacccggcgtttggccgggttttttgtgggcgctgacgggttagactcgcgcctcgttttaatctgttactcggctggaggcccccatgcagcacaccaatatcgacggcggcaccttgcagcgcgatgagctggaagacctgatcgccgagcacaatgggccattgcgcctgatgggcgttgacctgagtggggccgatttgtcgcgaatggtgctggaccactgggtgttcgagcgctgtatcctggtccagacctccttcctcggctcgcgcctggaaggtacgcagtggaaaagctgccgtgccagccacgcgattttcgaagctgccaacctgctggaggcacagttccacagttgtgacttgaacaacacacgctggcagcgcagcaaattgccccaggccagctttgagcactgcaagttgacaggggcgaacttcacccattgcgcttccctgggcctgagcttcagcgaaacccggctcaatagcgcgtttttgtccggtttgtcgtttgcgcgaaccgtgctgaataacctggatttttccgacagcgatttgtcggacgccgactttcgcaaggcagaactggtcgattgcagcctcgcccacgcgcgtatcaatggtgccaactttgccggcgccgacctgcgcggagcagatttgagcgggtttcgcctcaatgatgccaaactgttcaaaggcgccgtgatttccaaagcccaggcgtcgatgttgttgtccgagctgggcttgtccgttgcctaaggtttctgagtaatgctggttatttccaacaacgtgcacctgcccgatgccgagatcgagctgaccgccattcgcgcccagggcgccggtgggcagaacgtcaacaaggtgtcgagcgccgtgcacctgcggtttgatattccggcgtcgtcgctgccggacttttacaaggagcggctgctggcgctgcgcgacagccggatcaccagcgaaggcgtgctggtgctcaaggctcaacaataccggacgcaggagcagaaccgcgcggatgcgctggagcgtttggtggagttgatcctcagcgccaccaaggtcgagaagaagcgccgcccgaccaagcccaccctgggttcaaaaaagcgccgcctggaatccaagaccaagcgcggcagcatcaaggccgggcgcggcaaggtcgacttttaggcgccgcgtgcttcgcgggccttgggtgcctgacggtacaggtacacgctcagcagcaagccaccgaaagcggcgagggcggcgaacaggaagatcgaagcaaagccgaaacctgccgccacggcgcctgcgagcggaccggtgatgccgagcgacaggtcaatgaacagcgagtaagcccccaccgccgaaccacggctggacgcgggcaccaggttgaccgcctccaccccgagtgccggaaacaccagcgagaagccaaaaccgctcaaggccgcgccggccagcgccaagtgcgcatccggcgccagccacagcagcaacaggcccagaatttctaccgacaagcaggcaatggccacacggaagccgccaatccggttgatcagattaccgaacagcagccgcgcgccgataaagctggcaccgaacaggctcagggcccataccgcgttatcccaatgctgggtggtgtaatacaaggtgatgaaggtggcgatggtgccaaagccaatcgagcccaacgccagcgcgcagccgtgaggcagcacccggcccagcacgttcatgaagggcaggcgcacaccggccacgatgggcgcggcttccttgcgccaggccagggcgaagcccagaacggcgagcaagatgatgctgaaccccatgctccacaacccgaattggccgaccagcaccacgcccagcggtgcgccgacggccagtgcgccgtaactggcaatgccgttccaggagatcactttcgccgtattcgctgcgcccacccggccgataccccagccgatggcgcctgaaccgaccaggctttcggcgctgcccagcaccagccggccgataaacaggctggccaggctcagggccggcaagcttgaaagcaatgccgcgagcagcatgaacacgccactcaggccgcagcccaccaagccgatcaggactgcacgcttgctgcccagtgtgtcgatcatacggccggcgtaagggcggctcagcagcgtggccaggtactgcacgctgatcaccaacccggcgatgacggcgccatagcctagctggctatggacatagcccggcagcacggccagcggaatgccgatattcaggtagccgataaaggtgaacagcacgatggaaacgacttgcagcgtgaccgccatggggcgctgggtatctggcatgggagaggtccactgtcgcagcaggtaaagataggctgctaatgataccggtgctttggcttttatagggcgggaaaacgcaaaaacgtcgaatcagaatgacgtcaggactgggcgggcgtcagcagttgggtcgtgaccagggcggccaaggcgttttcctgggtgccaaaacgcttgagcaacagggcttgtttctcggggctgaggcggttccagacttcgaccatctgcaaggcagcgtcgagtacggcggcgtccggggaatcggggagggtatcggtcatcggcaatctcgggtggttcaggcagtgtggaaagcgctctaaagcggcgctttccacacggtctggtacggcgtcagtcctggcttttgccgtcgactggttttgcttctttggcctcaggctgctgtgggctggcctgctgcggtgttggctgctcagcttcgtgcaggcttgggaaggggagattaggtatctcgtgcatcgtcgtcgctcctcgcaaggtctgttttcaatcgcaggtgattccgcgctcttaaaaagccttgtgaggatacagcactgcaaatgacaaaaagattttaatgtcggcggatgtacgaactttcatcgattaaacgcaagtgacatgacgccacaccttaaaacggcaccttgcccagaatcatgtcgcggtacatcacgaagtcgcccaaaaggctgtaaaacgggtgctgaaaggtggccgggcggttcttttcgaagaagaagtggccgacccaggcaaagctgtaaccggcaatcggcaaggcaatcagcaggcctaatgagcctcgaccgatggcgtaggccaggatgccgatcacaagtgtcgtgccaataaagtgcaggcgccggcaagtgctgttggcgtgctcgctgaggtaatacgggtagaactcagcgaaggtattgaattgtttaacgttttccacggtggccggccctttgtttgttgtgccgcccaacagttgttcggcggggagcttatttgagtctagagtgatcagtggtaacagccagtgacaatagatgccactttagtatccttggcttcctggctgccgtttgagcctgctttttaaagaagacgccatgagcgaacgaacaacttctgcaagctgggcaatgggcatcgtcaaggcattggaaatggacgggctggactgccgcgccctgttcaagcaactggggctggactacgcggccctcagtgatcccgatgcgcgctttccccaggactccatgacccggctgtggcagcgggcggtggagctgtcgggcaacccggcgattggcctgaacatgggcaaggtggtgcgcccggcgtcgttccatgtggccggttacgcgttgatgtccagcaacacgctggccgaaggctttatgcggctggtgcgctaccagcggatcatcgccgaaagcgccgacctgagtttccgcctgttacccgaaggctatgcgctgattctgacggtgcacggcgaccatctgccgcccacccggcaaagcgccgaagcctcgctggccagtgcgttggcactgtgcggctggctgaccgggcgcacgttgcaaccgcgcaaggtgctgttgcagggcgaccagcctgcggaccttgcgccgtataaacaggcctttcatgcaccgctggagttcaatgcaccctatgacgcgttgattttcgagcaagccgatatggatgcgccgctgcctaccgccaacgaggccatggcgctgctgcatgaccggtttgcgggtgaatacctggcgcgcttctctgaaagccgcgtgacccacaaggcccgccaagtgttgtgccggctgttgccccagggcgagcccaagcgcgaagtggtggcccagaccctgcacctgtcacagcgcaccttgcagcggcgtttgcaggaggaaggcaccagctttcagaccctgctcgacgacacccgccgcgaattggccgagcagtacctggcgcagcccgccatgaccctgctggaaatcgcctacctgttgggctttgccgacccgagcaacttctttcgtgcgttccgccgctggttcgatgccacaccgggcgagtaccgggcgcggctgctgcaagcgccgacggtcagtggcgccaaaacgccggaatgcacagaacaaagactgtaatgatttccagtcggcccagcagcatgccgaacgacaagatccacttggccgcatccggcaggctggcgaagttgccggccgggccgatggtctcgcccaggcccgggccgacgccggacaccgtgctggcggcgccggtcagtgcggtcatccagtccagacccagcagcgacaaggccagtgcgatagcgcagatggtgatggcgaagaaaaacgagaaggtcagaatcgagcgcacgatttcttcgtcgaggcggtggccgttgtacttctgtttgatcacggcgcgcgggtgaatcagctgattcaagttggccttgagcaggatgtaggcgacctggaaacggaagatcttgattccgcctgccgtagagcccgagcaaccgccgataaagcccaggtaaaagaacagcatcagtgagaaattgccccacaggctgtaatcccccagtgcaaaaccggtcgtcgtcaccaccgacgtgacgttcagcgccacatggcgcagggcatcgagccaatgcaggttggtggtccaccagtaccaggtacccagtacgagccaggtcacgatcaacaaaccgagcaagccttgcacctgctgatccttgatcaacgcccgacggttgccgcgcaacgtggccacatacagtgtaaagggcaggctgccgaggatcatcaccaccaccgccacccagtgcacggcgggctgtttccagtgggccagggattcgtcggaggtggaaaaaccgccggtggaaatcgctgacatcgcgtggttgatcgcgtcgaataagcccattccggcccaccagaacgccaggctgccgagaatggtgatacccacatacgccgccacgatcagccgcgccaccatgtgcgagcgaggcatgaccttttccgagcggtctgaggattcggtctggaacagacgcatgccgccgatgcgcagcaacggcaggatcgccaccgccatgccgataaagccgatgccgccgagccagtgcagcagtgaacgccacatcagaatgcccggtgacatgctgtccaggccgcttaacacggtggaaccggtggcggtgatgccggacatgctttcaaagaacgagtcggtgtagctgatgtgctgggtcagcaaaaacggcagggcagcgaagatgcacacgacgacccagctcgtgacggtcagcaggtacatgtcccgggggcgaaggtgcacgtgttcggggcggccagggatgaccagggccaggcccgcaagaaaggtgatcatgctggcccacagaaacgatggcaggtcgctggtgcgttcgaaaatcaccagcgtggccatgggcacgaccatggcgatggccagggtgatcaggaagatgccgatgatgaaaccgatgatgcgcagggtcggcaacgccatgaaatgtgctcgggtgattgggcagaggcgccattctacctgtggtgcagggcatgtaaaccgagggcttgaggttgaaggaggtcaactgtgggagctggcttgcctgcgatgcagacaactcggtccaccagccattgcgaggtgatgctatcgcgggcaagcccggctcccacacagaccacccacagggatgtgggtgtctggccgggcggcataaaaaaggcgacccgaaggtcgcctcattcaatgcggcactgatcagaactcgtgatcagcgttgtccgggttcaggtcgctgatgcccagcttgccggcggcggcttcgatcgagccggtctgcttgaccagtgcggcgatggcatcgcgcacgatctggttgccctggtcgttaccggctgcgatcaactggtcgtagtgctcacccttgttggcgtgatcaaccatcacctggatcttagcttcggtcgacgccaggtcagccttcagcgcagtgtcggcagccgggtcggccttggccaccaacgacgacaagctcgcgccggtcattttggtgccgtcgacgcgggtgtactcacccaggtaaacgttacgaatacccttggcatcgtagaagtgcgagttgtgggtgttgtcgctgaagcaatcctgctcgtcttccggcgagttggcttccagggaaaccttcatgcgctcaccggccagttcgccgagggacaggctgcccatgccgaacaacattttgcgcaggccgtcggtggcaggttctgcctccagggtggcacggtagttgtcgtcgacgttgggtttccagttgccgaccatttcttccaggtcgctgaccagcagttgggtcacggcgcgcagataagtgcggcgacgttcgttattgccgccggtagcgccatcccccgtcatgtaatccgaagcagggcggttgcccgcgcccgggccggtgccgttgaggtcctggccccagagcaggaattcgatggcgtgataaccggtggcgacgttggcttcggagccgcccagctcattgaggctggcgagtttttccggggtgatttccttgacgtcgaccttgtcttcgcccacctggatctcggtattggcgatgatgttggcgttggcgcccgggttgcccagcgcgtgttcgtaggatttgtcgacgtagtcgatcaggccttcgtccaggggccaggcgttcacctggccttcccagtcgtcgatgatggtgttgccgaagcggaacacttcgctctgcaggtaaggtacgcgcgcggcgacccaggcggtgcgggccgctttgagggtgtcgtcgttcgggttggcgaggaaggtgtcgatcgcggtttgcagggttttggcagtggattcggcatcgctgtacaccgcgaacaccatgtctgcgtaatgcgcgaccacggccttggcagcggcttcgtcgacctggcctgccggggtggcagccgctggagcggtagtgctggcagccggggtcggcgcctgaggcgcggcggccttgtctttaccttcgccgcagccggcgagagaaatggcaatggccagcagactggcggtggccaggggcatacgaatcatggcgaacatcctgcttcggttgttgatagggcgcgcgggggagcgcaaaaactgcaacataatgcgaaagatttgcattttgtgtaaaggtttatacgagggaaatatttagtatcgatttgtcgtttcagagaatcgctgcgttgttgcgctcggcctgtttcaaataagccgccaactcccgggcttgcagcggtttgctgtagtgatagccctggccttcatggcagccctcggaaatgatgtaggcctcttgctcggcggtttccacgccttcggcgatcacctgcatgccaaggcttttgcccaactggatgatggcgcgcacgatggtcgcgtcgtcatcgtcatccagcaggtcttgcacgaagctcttgtcgattttgattttgtccagtggcaggcttttcaggtagctcaacgacgaatagccggtgccgaagtcgtcaatcgcgatcagcgcgccggaacgccgcaggctcagcaagtgctgggcggcggtgctgatgtcttccatcaggccggtctcggtgacttccagttccaggctgcgcggcggcaggcggtaaatctgcatcaggttgttgaccacccgcggcaactcggtgtgatgcaactgcacggtggacaggttgactgccatacgcagggtggtgaagcccaggtcatgccattcgcgcaattgcttgcacgcctggtcgagaacccactcgccaatcggaataatggtgccgttctgttccgccagggggatgaacaggtccggggggaccaggccgtgttccgggtgttgccagcggatcaacgcttcgacgccgaccacacggtggtcgcggtagctgatctgcggctgatagaccaggtggaattgctcgcggctgagcgcatcgcgcaggtctttttccagttcgcggcgccggcgcatttcgctgtcgacgctggcgatatagaactggtagcggttacgcgagcggctcttggccagggtcatggtctgttcggctttttgcagcagcttctcggtgctgtcgccgtcttccgggaacagggtgatgccgatggtggcgcgcaggcggatctgctcatgttcgagggcgaactcgccttccaggtcatccagaatgctttgtgccaactcggccgcttcgtaaggctggtcgatgtcggcctgcaccagggcaaactggtcgccgcccaggcgggccagcgcgccgaggcgcccactgtgggcgcgcaggcggtcggccagggccagcagcagtttgtcgccagcctggtaggtaaattgttcgttcacactcttgaagtcatccagccctacgcacaatacagccacgcgtcgctgccggcggccggcgtcgacgaggattttgtcgagttgctcctgcagtttctggcggttgggcaggccggtgagaaagtcgtactgggccatgcgcagcaggctgctttcggcctcgtggcgcaggtgggtattgcgctcgatggactcgagcagttggttggcggtgttgatccacagccccagttcattgcgttcgtggcccttgagctgagggattttgtgctcgctgggacggtccgggttgatcgaggtcaggtgttcgatgatccgcgataacggcttggtcagcagccagtggtagaccaggtacagcaccaggcccatggccagcgcgcgcaacacgccggagatgaagatgatcactgaactgaccagaaaacccttgccgtacgtggctgtgtcgagggtgatgctcaggtcgccgtagtactcgctgtaagggcctttgccgaccaatgaggtagtgaaggtgcgctcctgcccgagaatcagatcggtcagccagcgcgagggcgattgctgcaaggcgcggcttttttccgcgagcatggtttcgttgggatggccgatggacgccatgcgcacggcatcgtcctgaaacaggccttcgatcacctgcatccccatctcgcggtccaggctgtagacggcctgagtcgaggggtcgcgaaacatgtcgagaatacgctgggcatcgcccgccacggcctggcgcgtcttgtaggcatcgaaaacgatctgcgccacgctcagcgccacgcccacgatcaatgccgacagcagcacaacccgtagcaacttcaccgacaagctgtttttgagttccagcttcaaagagtcattccttgttccatgcgggtagcctcaatatgccatgagtattggcaatctcgtgatggcagtcaaaggaacattcgggcgttggcgggttggacgaggaactagaggcgggcaggggcaaggcggagaagtatccgcctgcttgagacaataccccgggcgcggagaaggcgccgagggcgggcgttgtctttatgaggcgatgttgatggttacattgccgtttgcggagtcgttcttcgcgaaatcgattcgatccttattgtgcatggcttcatgtgcgattttgttttgatcgccttcaccttctttgccgccagattgcgatttggccatttggctggccattttgacgagctcggtagccagtttcatgccttcttgggcaataccggcaaccattgggagcatggaagttgctgcgccaatcatagtaatttctccgacagattcgagaggcgaattcctcacgctgattgagtggcgtaatccagcggcccggttccgggcatcggacaatttattcccataaaaaagcccggcacatggccgggctctttttactgcaagcggtatttaggcagtgaaggtcttgccttcgaactgctcagccacgaacttccagttgaccaggttccagaacgcttccacatacttcggacgcacgttgcggtagtcgatgtagtaagcgtgttcccagacgtcgcaggtcagcagcggggtgtcgccgctggtcagcgggttgccggcgccgatggtgctggccagggccagggaaccgtcagcctttttcaccagccagccccagccggaaccgaaggtgccgacggacgtcttggtgaactcttccttgaacttgtcgaacgaaccgaacgcagcgttgatggcttcagccaatgcgccggtaggttgaccgccagcgtttggcgccaggcagttccagtagaacgtgtggttccagacctgagcggcgttgttgaagatgccgcccgaagaggacttgacgatctcttccagggtcttgccttcgaactcggtgcctggcaccaggttgttcaggttcacgacgtaggtgttgtggtgcttgtcgtggtggtattccaaggtttccttggaaatgtgcggctgcagggcatcgtgtgcgtagggcagcggcggcaattcgaaagccatgatgattctcctaatcaggtcagttgcggtgagcgcaaggccgatcacgggcggccaaacaagcgccggggagtttgtactctttgcggcgcaggggctggatcatagcaccggggttgcggcataaccacgcaacaactgtgtgggatagaggttccagagcgttttggaatattcctcaggcactgatcaattgataggtcacgctgaacatcatcaccgccaccaaaagatccagcaggcgccaggtcgccgggcgcgccagccagggggccagccaggccgcgccgagggccagggtggcaaaccacaggaatgacgcgctggcggcgccggccacataggcgccgggttcggtttgttgtgcacccagtgagccaatcagcagcacggtgtccaggtacacatgggggttcagcaacgttaccgccagggcactgagcaataccgcgcgcagtgaacgcaccttgaggttgtcgccttgcgccaggctttgtctggaaaacgcgcggcgcaacgccagcgtgccgtaccacaacaaaaaggcagcgccgccccagcgggcaatcgccagcagcaacgggttttgtgcgagcaccgtggccaggccgaacaccccggccgccaccagcaatgcatcgcagaccacgcacaatgccgccacgggcaagtgatgttcccggcgcaggctctgcgccagcacgaatgcgttctgggtgccgatcgccatgatcaggccgagggctaccaacagcccgttcacgtagctctgccacataagctttactccgcgtcttttgccagttggcgcaaaacgtccatggcccgcgcggcatcggcgcggccgacaaacaggtggtcgtggtaatagccggcgatcacgttgcaactgatgccggctttgcccagcgcgccggcgaacgcggcggtgaggcccacggcctccagggccgaatgcacgttcaaggtgatccaggccgccacgtagtcgaaggccaagcccgcctgttcggcttgctggcgctcgacaatcaaggtcaggccttccctctcgcgaaagctgccgatcacgtcgcagccctgtgggatgcggtgatcgggcagggtgcaaaacacatagtcgccatcgttcaactgcgggctcatgctgcgcagcagggttgccagggcggtttcgccagccatgtggggtttccttataaagagagaagcaatgctggccattctcgcgggctacgctgtataagaaaaaccaatattgctgatcgctcattagagaaactgatgttcgactataaattactctccgctttggcggcggtggtggaacaagccgggttcgaacgcggcgcccaagtgttgggcgtctcgcagtcggcaatctcccagcgcatcaagttgctggaagcgcgcatcggccagccggtactggtgcgcgccaccccgccgacgcccactgacattggccgtcgcttgctcaaccacgtgcaacaagtgcggttgctggagcgtgacctgcaaagccaggtgccggcgctggacgaagagggcatgcccgaacgcctgcgcatcgccctgaatgccgacagcctggccacgtggtgggccgaagccgtcagcggcttttgcgctgatcagcacttgctgctggatttggtcgtggaagaccagaccgtgggcctcaaacgcatgcgtgccggagaagtggctgcgtgtatctgtgccagcgaacgcccggtggccggtgcgcgcagcctgttgctcggtgccatgcgctatcgggcgttggccagcccggtctttattgcgcggcatttcccggagggtgtgcgcgccgatcaactggcgaaaacgccggcactggtgtttggcccggacgatttcctgcaacaccgttatctggcgtctctgggtgtggacggcggtttcgagcaccatttatgcccctcgtccgaaggttttatccgcctgacggaagccgggctgggctggggtttggtgccggagttgcaggtgcgcgaccagttggaaaagggcgtattggtcgagttattgccagataagcccattgatgtgccgttgtactggcatcattggcgcagtggcgggcaactgctggggctgttgaccgaccatttggcccaggcctgtggccaatggttggtgccgttggagtgatagcgggcgtcaaggcaacagcgatgaaaaacgaaagaacatggggtaacaaatgaaaattctggtcaccggcgcaagcggcttcatcggcgggcgtttcgcacgtttcgctctggagcagggcctggacgtgcgggtcaacgggcggcgcgccgaaggtgttgagcacctgatacggcgcggcgccgagtttatccagggtgacttgaatgacgccgacctggtgcgcgagctgtgccgtgacgttgaggctgtggtgcattgcgccgggtccgtcgggctgtggggcaagtaccaggacttccatcaaggcaatgtgctggtgactgaaaatgtcgttgaagcctgcctcaaacaacgcgtcgggcgcctggtgcacctgtcgtcgccatcgatctactttgatgggcgcgatcacctgggcctgaccgaagagcaagtgcccaaacggttcaaacatccttacgccgcaaccaaatacctctcggaacaaaaggtgttcggcgcccaggagtttggcctggaagtgctggctctgcgccctcgtttcgtgaccggcgccggcgacatgagcatcttcccgcgcctgctgaaaatgcagcgcaagaaccgcctggccattgtcggcgacggcctgaacaaggtcgacttcaccagcgtgcacaacctcaacgaggcgttgctcagcagcttgctggccaccggttccgcgctgggcaaggcctacaacatcagcaacggcacgccggtgccggtgtgggatgtggtgaactatgtgatgcgccagatgggcatgccgcaagtgacgcggtatcggtcttacggtttgtcctacagcgtcgcggccttgaacgaggcattctgcgcgatgtggccagggcggccggagccggcgctgtcgcgcctgggcatgcaggtgatgaacaaagatttcaccctcgacatcagccgggcgaggcattatctcgactacgagcccaaggtcagtctgtggacggccctggacgagttctgcagttggtggaaagcccaggatccggcgttccagtaagttcacaacaggcaacacatcgggaaccgaattcacggttccgggtcgatctgtgcggcacgaacgcggtttatactccgttcgctcggcgttccaggtagccatctcattgattcagggtagattcatgcgtaacgatgctaaagacgatttcgacaacgttcccggcctgcgcgccgacgttggggacgatgatgatttcgagccgactcctgccacctccgtacgttcgcgcagcacaccggccgtcagggtcaaaagtgccagtaccggcccgctgtgggccttggtcggcgcgctgctgatcgcctttgcgggcctggcctggtggagcttccagcagatttccctgatgggccagcaattggttgccacccaggaaagcttcgcacgcatcagcgaagaagcggccgggcgcctgcaggatatttccggcaaggtagtggccagcgaggccaatgtgaacaacggcagcgaggcgctgaaactgcagatcaaggcgctggaaacccagttgctggagcagggcaagcaacaaatcggcgtggccggccaggccaccgagcttgaccagcgcctggcacagatgagtgccagtaccaccgacctgtcgaacgcgaacgccaagctgcaggggcaggtgcaggcattgaccgatgccgtcgccaccctcaaggctgcgcaaggggatgcgggcaagcgcgataccgagatcaaggatttggccgccgacgtcgcagccctgaaaaaacagggcaacccgagcgctgccatcgcgcgacttgaacaagacctgatcgtgctcaaaagcgcgcaggacaattcacccgccaacagcgatgcgccgaccaacaaagagttcgacgtattccgcatccagaccacccgcaacatcaccaccttgcagagccaggtgcagaacctgaaccagcagcttaacgcgccggcgaagatcaccccgctcacccagtaaccgcagagcggacttgggtgggagctggcttgcctgcgatggcatcactgcggtgtaactgacgcaccgaggtgatgccatcgcaggcaagccagctctcacattttagatccaggtcaactcggaaaaagagtttctatcagtgaatgtcacaaggcggtgacatttcccctccgcttcgttacttgccctcatcccgcccttgtttagactccggtcatcccacaaaaaataataagggccacccatgaccacgcaaccgctgccagccagcagctggctgaacgcacctgcccatcacgcttggctcgccgccgaaggccaacgcctgctgtcatttgccaaagcctctcgactgcccgagggttttggcaacctggacgacaaaggccaactgccggccgatgcccacgccgaaaccatgaacaccgcccgcatgacccacagtttcgccatggcccacgccatggggctgcccggttatgccgagttggtcgagcacggtgttgccgccctcagtggccctttgcgcgacagcgaacacggtggctggttcgccgccccccacgccgttgatggcaacagcggcaaggcggcctacctgcatgctttcgtggccctggcggccagttcggcagtagtggcgggtgcgcccggtgcgcagaacctgctgaatgacgccatccatatcatcgaccagtttttctggagcgaagaagagggcgtaatgctcgaatccttcgcccgggactggactggcgtcgaagcctaccgtggcgccaacagcaacatgcacgccaccgaagccttccttgccctggccgatgtgaccggtgacacgcgctggcttgaccgcgcgctgcgtatcgtcgagcgtgttattcacacccatgccgccggcaaccagttcatggtcatcgagcatttcgacgcccagtggaaacctctgctcggttacaacgaagacaaccccgccgacggctttcgcccttacggcatcacccccggccatggtttcgaatgggcgcggttggtgctgcaccttgaagctgcgcgcctgcaagccaaactgcccacgccggactggctggtgacggacgcgaagggcctgttcgccagtgcctgcgaatacgcctgggccgtggacggtgcacccggcatcgtttacaccgtggactggaagcaccaaccggtggtgcgcgagcgcctgcactggacgcacgccgaagccagcgctgccgcccaggccttgctcaagcgcacgggcgagttgcattacgagacctggtaccggcggttctgggagttttgcgaaacccgctttatcgaccggattcacggcagctggcaccacgagctgagcccgcaaaaccggcccagcagcaagatctgggggggcaaaccggacctgtaccatgcctggcaagcggtggtgctgcctgcgctacccttgtctcccagcatgaccagcgcgctggggcgcggctgttatgtcaccgagtggtgacatttgtacgtccctttgttacctgcggcccaaatatccctgtttaaactccgtgcagcgcaagctctagacttgcatgcataacaacaagaaaaggtactcagatgaacgcgattaatcgcctcgccgttgctatttccattgcctcgttgtttcccctcagtgcatttgccgccgactcgaaagggacggttgaagttgtgcattggtggacctccggtggtgaaaaagcagctgtagacgtactgaaggctcaagttgaaaaagacggcttcgtctggaaagacggcgctgtagccggtggcggtggcgccacggccatgaccgtgctgaaaagccgcgcagtggctggcaacccgccaggcgttgcccagatcaaaggcccggacattcaggaatgggcgtcgaccggcctgctcgacactgacgttctgaaagacgtcgccaaagaagagaagtgggactccctgctcgacaagaaagtctccgacaccgtgaagtacgaaggcaattacgttgccgtaccggtcaacatccaccgcgtgaactggctgtggatcaacccggaagtcttcaagaaagccggtatcaccaagaacccgaccaccctcgaagaattctacgcagccggcgacaagctgaaagccgcgggcttcattccgctcgcccacggtggccagccttggcaggacagcactgtattcgaagccgtcgtcttgtcggtaatgggtgcagatggctacaagaaagccctggttgacctcgacaacgctgcgctgactggcccggaaatggtcaagtcgctcactgaactgaagaaagtcgcgacctacatggacgttgacggcaaaggccaggactggaacctcgaagccggcaaagtcatcaacggcaaggccggcatgcagatcatgggtgactgggccaagtccgaatggaccgccgccaagaaagtcgccggcaaagactacgagtgcgtagctttcccgggtaccgacaaagccttcacctacaacatcgactccctggcggtgttcaagcagaaagacaaaggcactgctgccggtcagcaggacatcgccaaagtcgtgctgggtgaaaacttccagaaagtcttcagcatcaacaaaggttcgatcccggttcggaccgacatgctgcaaaaaatggactcgtacggtttcgactcctgcgcccagactgctgccaaagacttcctggctgatgccaagaccggcggcctgcaaccaagcatggcgcacaacatggccactaccctggccgtgcaaggtgcgttctttgatgtcgtgaccaacttcatcaacgacccgaaagccgacccggccgacaccgccaagaaactcggcgctgcgatcaagtctgccaagtaacggttagcactgctggtccttgtgaggggaaaccccctgacccctcacaaggcatgctcctgtagtcctttttccctgtactggattttcccatgagttctgttgctgtgttcagcaaggcctcgccgttcgacgcactgcagcgctggctccctaaactggtgctggcgcccagcatgttcatcgtgctggtgggcttctacggctacatcctgtggacgttcgttctgtcgttcaccacctccacgttcctgcccagctacaaatgggccggccttgcgcagtacgcgcggctgttcgacaacgatcgctggtgggtcgcgagcaagaacctggccgtgttcggcgggatgtttatcggcatcaccttggtgattggcgtgatgctggcgatttttctcgaccagaaaatccgtcgcgaaggctttatccgcaccatttacctgtacccgatggcgctctcgatgatcgtgaccggtaccgcgtggaaatggctgctcaacccgggcatgggcctggacaaacttctgcgggactggggctgggaaggcttccgtctcgactggctgatcgaccccgaccgcgtggtctactgcctggtgatcgccgctgtgtggcaagcctccggcttcatcatggcgatgttcctcgctggcctgcgcggtgtggaccaatcgatcatccgtgccgcccagatcgacggcgccagcctgccgcgcatctactggagcgtggtgctgccaagcctgcgtccggtgttcttcagtgcggtgatgatcctggcgcacattgcgatcaagagcttcgacctggtcgcggccatgactgccggcggcccgggctactcgtccgacctgcctgcgatgttcatgtactcgttcaccttcagtcgtggccagatgggcatgggctcggccagtgcaatcctgatgctcggcgcgatcctcgcgatcatcgtgccttacctgtactccgagctgaggaccaagcgtaatgactagtctcgcttccaaaccgaccatcagcctgagtcgcatcgcgatctacgcggtgttgatcctcgccgtgttgctgtacctggtgccgctggtggtgatgctgctcaccagcttcaagaccccggaagacatcagcaccggcaacttgctgagctggccgagcgtggtcaccggcgttggctgggtcaaggcctgggccaccgtggatggctacttctggaactcgatcaagatcaccgttccggccgtgctgatctccaccgccattggtgcgctgaacggctatgtgctgtcgttctggcgcttcaagggctcgcagctgttcttcggcctgctgttgttcggctgcttcctgccgttccagaccgtgctgctgccggcctcgttcaccctcggcaagatgggcctggccagcaccaccaccggcctggtgtttgtgcatgtggtctacggcctggcgttcaccacgctgtttttccgtaactactacgtgagcattccggatgcgctgatcaaggcggcacgcctggacggtgccggtttcttcaccatcttccgtcagatcattctgccgatgtcgacgccgatcatcatggtctgcctgatctggcagttcacccagatctggaacgacttcctgttcggtgtggtgttctccagcggtgactcgcagcccatcacggtggcgctgaacaacctggtcaacaccagcaccggggccaaggaatataacgttgatatggcagcggcgatgatcgccgggttgccgaccctgctggtctatgtgatcgcaggcaagtatttcgtgcgcggcctgacggccggcgcggtcaaggggtaatcatggctacgcttgaacttcgcaatgtaaacaagacctatggcgccggcctgcccgacaccttgaagaacatcgaactgtcgatcaaggaaggcgaattcctgattctggtcggcccttcgggttgcggtaaatccacgctgatgaactgcatcgccggcctggaaaccatcaccggtggcgcgatcatgatcggcgaccaggatgtgagcggcatgagccccaaggatcgcgacatcgccatggtgttccagtcctatgcgctgtacccgaccatgagcgtgcgcgagaacatcgagttcggcctcaagatccgcaaaatgccccaagccgatatcgacgccgaagtggcgcgcgtggccaagctgctgcagatcgagcatctgctcaatcgcaagccgggccagttgtccggcggccagcaacagcgtgtggccatgggccgtgccctggcgcgtcgtccgaagatctacctgttcgacgaaccgctgtccaacctcgacgccaagctgcgcgtcgaaatgcgcaccgaaatgaaactgatgcatcagcgcctgaaaaccaccaccgtctacgtgacgcacgaccagatcgaagcgatgacgttgggcgacaaagtggcggtgatgaaggacggcatcatccagcaattcggtacgccgaaagaaatttacaacgacccggccaacctgtttgtggcaagctttatcggttcacctcccatgaacttcgtgcctttgcgcctgcaacgcaaagatggccaattgatagctcttctcgacagcggccaggcgcggtgcgaattgccgctgagcatgaacgatgccggccttgaagaccgcgacgtgattctgggcctgcgccctgagcaaatcgtactggcgacgggggagggcaatggcgcttcgagcattcgtgccgaagtccaggtcaccgagccgaccggcccggacacgctggtgttcgtgcaactgaatgacaccaaggtctgctgccgtttggcaccggacgtggcaccgcaggtaggcgagaccctgaccctgcaatttgatccggccaaggtgctgctgtttgacgccaagacgggcgagcgcctgggcactgcagcttctttgcctgcacagggacatgccgacaatgtggcccagttcaaaggccgctgagaagataagttgttgttttagttaaaaaaagtaaaccgcgttagataaaaacagtttaataacaataaagacgaggatgtagggatgaaaaagcaacacaacaacacccggctgatctgccaactgtcagcagcagcagccttggtattgtccgccaatgcgatggcggccgatgccttcagttccgactccaagtggatgaccggtgattggggcggcgagcgtaccaagctgatcgagcaaggtatcgacatcaaggctgactacgtcggggaagtcggtggcaacctgagcggtggctacaacaacgacaaaactgcccgttacgctgaccagttcggtctgggtgtagcactggatctgcaaaagctgtggggctgggataacacccaggccaagatccaactgactaaccgtaatggcgccaacatctccaatgaccgaattggcgacccgcgtgccggcaccttgagttcgtctcaagaagtcgatggccgaggccacatggtgcgtctgacccagttctggattcagcaccagatgttcgacaacaagttggacgtgaaactcggttacttcggtgaaggcgaagacttcaacaccttcccgtgcgacttccagaacctgtcgttctgcggctcgcaagtgggtaactacgtaaacacctggtacaactggcctgtcagccaggcggctatccgcgtgaagtacaacatcacgccagagctgtatgcgcaaatcggtgcgtacaaccagaacccgtcgcaactggagcacggcaacggcttcaaactcagcggcagcggcaccaagggcaccgtattgccggtggaattggtctggtcgccgaaggtcaatggcctgccgggcgaataccgtgtgggttactacaagagcacggctgacgcgaccgacgtacgtgaagacgtcaacggtaacgacgctggcaccaccggcgctgccttccgtgtccgcagcagcaaaagcggttactggggtgttctgcaacaacaactcaccacgcacaatggcgatgcttcccgcggcctgaacatcgcggcgaacgtgaccttccacgacaaggacaccaacctcgtcgacaactaccagtcggtcatgctggtgtacaaagggccatttgacgcgcgtaccaaagatgacgtcggtatcggtgtttcccgtatccacgctaacagcgacgtgaagaaaaacgctgagttgttgaacgctgccaaaggctttaccgattacgaccaatcgggtttcgcaccactgcgtaacactgaatacaacgtcgaaatcaactacggcttccacgtgaccaactggctgaccgtgcgtcccaacctgcaatacatcgccaacccaggcggtgtgaaagaagtcgacaacgcgctggtagcgggcctgaaaattcagtctacgttctaacgctgttgcgataagctccttctctctgtgcgcattttgcgggtagccatggctacccgctttttttgggctgcacactgcacaacccatgtgggagcaggcaagccagctcccacagggaacccaagtttgagcgatattgaatttcaggaccgtggcacatgcatgagcatccgctgcaacgttttttcaaatcccttcgcgaacaaccggtgttcgcctgggagcgctttcaaatgcgcgacgtgttggtgatcgaccacccgctgtgccaggcggtgttcagccgccagggcgcgcaattgctgcactttcagcccacgggccagaagccctggttgtggtgcgcggccaagtggccacaggtcggcgccatccgtggtggcgtgccggtgtgctggccgtggtatggccgccacccgagcgaaaacgcctggccgtcccatggttgggcgcggctgattgactggaaactgctcgacagcagcgccgatgacgacggcgtgcgtttgcactggcaactgcaactgtgcgactggcaggtggatttgcatgcgcacctgggtgaaaccctggaactgcgcctgagcaccgagcatcaggacgagttgccgtgccagttgagccatgcattgcacgcttattggcgtattggtcacgtcgatgagatagcgctgtctgggttggatggcgcgcaaggttatgaccagctcagccgtcaggtttgccagcaggaaggcgagttgcgagtggatggcgggtgccagcgggtgttccagcatgacggagagttacagctcaaggaccgcgcctggcagcgtgagctgtgcatcgatacgggtgatagcgcggacacggtggtatggcatccgggtagccggccgctgttgggggtgagttttaacgaggcatcggggtttgtgtgtgtggaagcggcgatggctggcgccagtctggcaccgggggagagggcgcacttgagtttgcaggcccgggctggggtttagcggtgtggcttctggcgttatcgctggcaagccagctcccacatttggaatgcattcccctgtgggagctggcttgcctgcgatagggtagggactgctggtggagattgctgctagttgaattcgtcgcccaccgggtaccggctgtcattcaaactctctttgatcttgcgcaaatgcggctggaagtccacaccccggcgcaacgtcatgcccgtcgccagtacgtccagcaccgtcaactgaatgatccgcgaggtcatcggcatgtagatgtcggtgtcttcaggcaacggaatgttcaaactcaccgtactggccttggccagcggcgagttctcggcggtcacgccaagtaccgacgcaccgttttcccgcgcgatacgcgccacttccaccaactcacgggtccgcccggtgtaggaaataatcacgaacaactcgccggtgtgcgccactgaggcgatcatgcgctgcatcagcacgtcggcgtgggcggtcacggccaggttgaagcggaagaacttgtgcagcgcatccatggccaccggggccgaagcgccgaggccgaagaagtggatctgccgtgcctggatcaacaggtccacagccttgctgatcaacgcagggtccagggcctggcaggcgctgtccagcgaggcaatcgcgctgccaaagatcttctgcgtataggcctcagggttatcatcagcctccacggcgcggctcacgtacgccgcgccactggccaggctttgcgcgagttgcaatttaagttcagggtaaccgctgacgccgaatgaacggcagaaacggttgaccgtcggttcactgaccgaggcggcttgggcgagggcggcgatagagaagcgggttgcctgctgcgggttgagcaggatgacctcggcgacttttttctcggccttgttcaattcttcgaggcggttccggatctgttccagaagatttcgcacgcggtccattcagtctttccttcgggcgacgatgcaaattaagggcggcagccaatcgacgagtggcatttcgcggtggcctatcctactgagggtagctgaacaccaccactcggaatgcgtatttcgggaaaatgttgtggttattactacatttttccttgagtgatgccttgaaaaaaggtatttgtagcttaacttgataaaagaacaaacatcatgccttcgataaccgtagaaccctgcacctttgccctgtttggcgccttgggtgatctggcgctgcgcaagttatttcctgccctctatcaactcgatggcgccgggctcttgcacgacgacacccgcgtcctggccctggcccgtgaagccggctccgagcaacagcacctggcccacatcgaaaaagaattgcgtaaatacgtgggcaaggagctcgacgaagccgtggccgcgcgcttcctcgctcgtctgtcctacgtgcatgtcgatttcatgaaagccgacgactatgtgggcctggccgaaaaggccggcaccgaacaacgcctgatcgcctacttcgccaccccggcggcggtgtatggcgcgatctgcgaaaacctggccaaggtcggcttggcggaaaatacccgtgtggtgctggaaaagcccatcggctcggacctggagtcttcacgcaaggtcaacgacgccgtggcgcagttcttcccggagaaccgcacctaccgcatcgaccactacctgggcaaagaaaccgtccagaacctgatcgcgctgcgtttcgccaacagcctgttcgaaacccagtggaaccagcattacatttcccacgtggaaatcaccgtggccgagcaggtcgggatcgaaggccgttggggctatttcgacaaggccggccagctgcgcgacatgatccagaaccacctgctgcaactgctctgcctgatcgccatggacccgccggccgacttgtccgccgacagcatccgtgacgagaaggtcaaggtgctcaaggccctggcgccgatcagcccggaaggcctgaccactcaagtggtgcgcggccagtacatcgccggctacagcgccggcaagccggtgccgggttacctggaagaagagaattccaacacccagagcgacaccgaaaccttcgtcgccctgcgtgccgacatccgcaactggcgttgggccggcgtgccgttctacctgcgcaccggcaagcgcatgccgcaaaagttgtcgcagatcgtcatccatttcaaggaaccgtcccactacatcttcgcccccgagcagcgtttgcagatcagcaacaaactgatcatccgcctgcagccggacgaaggtatttccttgcgtgtgatgaccaaggagcaaggcctggataagggcatgcaactgcgcagcggcccgctgcaactgaatttttctgacacctaccgcagcgcacggatccccgatgcctacgagcggttgttgctggaagtgatgcgcggcaatcagaacctgtttgttcgcaaagatgaaatcgaagccgcgtggaagtggtgtgaccagttgatcgccgggtggaaaaaatccggtgatgcgcctaagccgtacgcggccgggtcctgggggccgatgagctcgattgcactgatcacgcgggatgggagatcgtggtatggcgatatctgaattgaaactgcctcagggcgtaagcgcccatgagtaccgcacgcccgtgctgctggcggacggtttggccaatgatgtggccgcgcaattgcgtgcggcgatcggtgcccgtggcgaagcgacgttggtcgtgtcgggtgggcgcagcccggtggcgtttttccagaacctggccaagcaggcgctggactggtccaaagtcaccatcaccctggctgatgagcgctgggtgccggtggagcacgccgacagcaatgccggcctgttgaagaagtatctgctgcaaggctcggcggcgaaggcgaaattcctgagcctctacaacgttgccgccaaccttgaagacgccgccgaactggccgatcgccagttggcagaattgcccgccattgatgtgctggtgctgggcatgggcgatgacggccacaccgcgtcgctgtttcccgacagccccaacctgaaagaagccctgcagcccgacggtacccgccgttgctggccgatgctggcgccgaccgtgccgcaccagcgcctgaccatgagtcgcgcactgttggccacggcccactacaccgtgctgtcgatttccggcagttcgaaattgaccaccttgagcgccgcgctggcgagtgacgacgtcgccgccatgccgattcgcgcgtttttgcaacctactttagagatttactggtgcccatgagccaaggatcagccgctatgaaaagccctcaaccgaccgtgtccatggcggacaaagttgccctgatcgacagcctctgcgccaaggcgcggattctgccggtgatcaccatcgcccgcgaacaggacatcctgccgctggccgatgccctggcagcgggcggtttgaccgcattggaagtgaccctgcgttccgagtttggcctcaaagccattcaggtcctgcgcgagcagcgccctgaattgtgcaccggtgccggcaccgtgctcgaccgtcacatgctcgaagcggcggaagtggccggctcgcaatttatcgtgacgccaggcattacccgcgacctgctggaggcctcggtgcatagcccgatcccgctgctgccgggcatcagcaatgcctccggcatcatggaaggctacggcctgggttatcgccgcttcaagctgttccccgctgaagtcagcggtggcgtggcggcaatcaaagccttgggcggcccgtttggcgaagtcaaattctgcccaaccggcggcgttggcccggccaacatcaaaaactacatggcgttgaaaaacgtgatgtgcgtgggcggtagctggatgcttgatcctgagtgggtcaagaacggcgactgggcccgcatccaggaagtcaccgcacaggcgctggcgctgctggattgagctgatttaacgaatcgttgttgctgtgcttgacggcatttttgcggcgcacttggtcggtgtgccgcttttttttgcctgtagaaaagcccaagaactccgatgttcaaatgtgggagctggcttgcctgcgatagcggtgggtcagaaaatacaggtgtgactgagataccgctatcgcaggcaagccagctcccacagttttaatctgtgttcagttcggtaatggcatggaccagtacattcatgtctgccgccgacgtcaccaaccccggcgtcacccgaatacaactgccaaacgccgcgccgcttcgggtggtggtaaataggccgtaatccttgagcaagcagtcggccatcagttgctgatcccgcccgacaaacttgaacgccgtgatcccgcaatacagccgtgggtcatccggcgtcagcacctcaacccccggcaaccgccgcacctggctcacccacagatttcgcaggtaattcacccgcgcgcctttagccgctgagcctcccaacgcacgatgctcttcaaacaccagtggcaaggtcatcagcgccggaaagttcggcgtgctgtaggacgtgcgtgcgcgcacgtctgtggcagggtagtgaaactcgcccatgtccgggtcgatatccgccaggcgttccggggcgatgtacagaaagcccagggtcagcggcgcgccgatccacttgtgcaggttgaaaccggcaaactggatacccagttccgccaggttgaactcgatctggcccaaggcgtgcgcaccgtcgaggatgacgtcgatgccatgctcacgcgcggctttggcaatcgcctcgaccggcatcaccagcccggtgcgatgggtgacatgggtcagcgccatcagcttcaggcgcgggtagcgcgtgaaggcttcgcgatacgtctgcaccaggctgtcgaaactggccgggtgcgtgtggggcagttcgatcacctccacaccgcgaacgcccgccagccagcgcatggcgcctttgaccgtgtcgtactccaggtcgctgatcagcacctggtcgcccgggcgcaggccgttatagttgcggatcagcgactgcaaggcctcagtggcattgcgcgtgaaggctaccgactcggggtcgacgccgatcagctcggccaactggcggcgtatctcaacgttctccccctgttcaaaacgctggcgcacatagagcgagttgctgcggttgataaacgcaacgtgttccagatagtgcgcccgcaccccgcggctcatgcgcccgaagtaaccgttttccaggttgatcgggccaggctccagctcatagcgctgggcgatggcttgccagtggcgttcgttatcagcattccttggcatggcgaggctcttaatggcgaggggcgggtttgccgtgtttggcgcgcagcggctccagcagttcggccaagccgttgctgtcgatttcctgcatcaatgccagcagcccacccagttcgccgtggggaaaaccttcacgggcaaaccagttcaagtaggggccgggcaggtcggcgatgatccgccctttgtacttgccgaagggcatttggcgggtgatcagcagttcgagcttttcggggttcatggggcttcaagcattcaagtcgaggccttggaaaatacaggcattctgcatgaaggccaaatgacagatcatgcaaataacgtacatacagatggttcaataaattataagtacatgaaaaatatagaaaaagttgtttttcaaaaactggcacgggcgctgcaactacctttacacgtttctaaacccgcacaaggaattgaaaaatgaccgacatcaacaaagaatcgatctccgtactcaacgacctgatcgagaccagcaaagacggccaggaaggcttcaagacctgtgctgaagacatcaagcacccagagctcaaggcgctcttcaccaagcgctctaccgactgcgcaaccgctgctgccgagctgcaaacggccgtgcgtgcactgggcggcgatccggagaaatccggttctgttgccggcgccttgcaccgtggctgggttgacgtgaagtcgctggtcaccggtaaagatgaagaggcggtactgaacgaagctgagcgcggtgaagaccacgcattgaaggcttacaaggaagcgatcgagaagatcaacaagcacaacctgctgggtattcgtgacctggttgagcgtcagtaccacggtgcgcaacgcaaccacgaccaggtgaaagccctgcgtaaccaggctcgcgccaactcttgattactggcgtgtaacccctctgggagcgggcttacccgcgatgacggtctgtcagttgacctctgtgtcgactgaactgccgctatcgcgggcaagcccgctcccacatgtatcagccaatgctgatcggcggcagctcggtcaacgtcacaacctgctgcttgcgcggcgccagaatttccgcttcgccatccaccaccaattcatcgcgctggttgaacacgcgagtggcaatgcgcacacgaaacttcggcagtttctcgaggatttccaggcggacggtcagggtgtcgccgattttgaccggcttctgaaagctcatctgctggccgatatagatagtgcccggcccaggtagctcgcaggcgacggctgcgctgatcagggcgccgctgaacatgccgtgggcgatacgttccttgaacatggtcgccttggcgtactcggcatccagatgtaccgggttgtggtcgccggacatggcagcgaacagctggatatcacgctcttcgacggttttgctgaaactggccgtctggccgacttcaagggcttcgtacggggtgttggtaacctgggtcatctaaaggtgcatcctgtggctaatcggtaatgtaatgatctgattttaaacgaaaaattattcgcagcgggccggcctgcgcagcgtcagggcctggtcgagccacgtcagcacatccgctgtgacaacgtcgcggttggtttcgttgaatacttcgtgccgtgcctgcgggtaaatagtcagttgcaggttctggcaaccggcctcacgcagagcatgggccaggcttttgagacgcttgccctcactcaccggatcacattcgccgccgatcaccagaatcggcaagcccgggtcgatctgagcgagattggacgctttgctgatttgctgcaagccgccgagcaggtcgatccacagctggttggtgcagcggaaaccgcagagtggatcgctgatgtacttgtcgacttcagccgggtcgcggctgagccagtcgaaggccgtgcggttgggcttgaacgctttgttgaatgagccgaacgacaaaaagtcgatcaatgcgctgcgcccgcgcaaaccctggcgtaaacgctcaatgtgcgcgatcacccgagcggcgcggtacagcgccaccggttggaagttcgaaccgctgagaatcgccccgttcaaactggcgctatggtgcagcaagtacgcttgagcgatgtagctgcccatgctgtggcccagcaagatgatcggcagcccaggcgtttgatgcgcgatgtgctggttgaggctggccaggtcgcccaccactttgttccagccatccttttcggcgaacaaccccagggtacctgcgtcggcggtgcggccgtggccacgctggtcgagcgcatacaaaccataaccggctgcgcacaacgcctcggccaggcgcccgtagcggccgctgtgttcggccatgccgtgggacagcatgatcatcgccttggccgggccttgcggcagccattgattgacgtacaggcggctgcggtcattcgcggtcagccagaaggtgctgtggttcatggcgtttcctttgctcggggtcgatgcagtgtatagctcatccgttaggggctggggtatctgcctacacgttaggagcaagattcatacaataaatgacacagttcgatgtatttgcctgtttggtgatagctgctaacgtccccaaagctccgctttccatagcttcagcaaagcggccgggcacactcaggtaagaggacaagaataatgcaacctgatttctggaatgacaaacgcgcggcgggcgttcccaatgacatcgacctgagcagctacaagtcagtgatcgaagtgttcgagcgttcctgcaaggcctttgctgatcgtccggcgttcagcaacatgggcatcaccctgacgtacgccgagcttgagcgtcagagcgcggcattcgccggttacctgcagaaccacaccgacctcaagccgggcgagcgcatcgcggtgcagttgcccaacgtgttgcattacccgattgcggtgttcggcgcattgcgcgccgggttgatcgtggtcaacaccaacccgctgtacaccccgcgcgagatgcgccaccagttcaaggatgccggcgtgcgcgcgttggtgtacctcaacctgttcggctcgcgggtgcaggaagtgtgcaccgacaccgagatcgactacctgatcgaagccaagatgggcgacttcatgcccgccgccaaaggctggctgatcaacaccgtggtcgacaaggtcaagaagatggttccggcctacagcctgccacgggcgttgtcgttcaagcgcgccttgcgcatgggcgcgggccttgcggtgacccgccatcccgtgaccctggatgatatcgccgtgctgcagtacaccggcggcaccaccggcctggccaagggcgcgatgctcacccacggcaacctcgtcgccaatatgcagcaggcgcgggcgtgcatgtcccaggtcgccgacgacggccagccgcttgtcagggaagggcaggaggtaatgatcgcgcccctgccgctgtaccacatctatgccttcacggcgaactgcatgtgcatgatggtgaccggcaaccacaacgtgctgatcaccaacccgcgggacattggcggctttatcaaggaactgaaaaagtggcggttctcttgcctgctcgggttgaacacgctgtttgtggcgctgatggatcaccctgatttcaagaccctggatttctcccatctcaaaatcaccaactccggcggcacggcactggtcaaggccacggctgaacgctggaaagcactgaccggttgctccatcggcgaaggctacggcctgaccgaaacctcaccggtggcgagcaccaacccgtacggcagccagtcgcgcctgggcaccgtgggtattccggtgccgggcacggccatgaaagtcatcgacgacgaagggcgtgagttgccactcggcgagcgcggcgagttgtgcatcaaaggcccgcaagtgatgaaaggttactggcagcagccggttgccaccgccgaaacattggacgctgaaggctggctcaagaccggtgacatcgcggtgatcgatgccgatggtttcgtgagcattgtcgatcgcaagaaagacctgatcatcgtctcgggtttcaacgtgtaccccaacgagatcgaagacgtggtcatggcgcacccggccgtggccaactgcgccgtgatcggtgtgccggatgaccgcacgggggaggcggtgaagctgttcgtggtggcgcgggcgcagggcgtgagccttgaggagctgaagacttactgcaagaccaacttcaccgggtacaaagtgcccaagcatattgtgttgcgtgagtcgttgccgatgacgccggtgggcaagattttgcgcagggaattgcgcgacatcgcttgatataaaacgcggtaaaaaatgtgggagctggcttgcctgcgatagcggaccatcagtcgatatatccggtgactgatagatcgctatcgcaggcaagccagctcccacattgtcatttgttgatctgtaaagcccattccagagcctttttccaggggatttcgtactggtttaaagtgtgaccaaatattgtaggacagtcgtgattatgactgtaggacccccttttggctctaggcggcccttggcaaagctgctactctcggcgcgctttgtgacttctcggcctgctttcaagcgccagattcaccttaaaaaaacatacaccaataataatcgcatcaaatgcgatgatgaattcgcgtcgctgaggagtgggcttccatgaacgaagacttttggaaggataagtaccccgccgggattgctgccgacatcaatccagacgagtatccgaatattcaggcggtactgaaacagtcctgccagcgcttcgccaacaaaccggctttcagcaacctgggcaagaccatcacctacggtgagttgtacgaattgtccggtgcattcgccgcgtacctgcaacagcacactgatttgaaacccggcgaccgcatcgccgtgcaactgcccaacgttctgcaatacccggtcgctgtgttcggtgccatccgggccggcttgatcgtggtcaacaccaacccgctgtacaccgcgcgggaaatggaacaccaattcaacgactccggtgccaaagccctggtctgcctggctaacatggcccacctggcagagaaggtcgtgcccaagacctccgtcaagcacgtgatcgtcactgaagtggccgacctgttgccgccgctcaagcgcctgctgatcaacagcgtcatcaagtacgtgaagaaaatggtcccggcttaccacttgccgaaggcgatcaagttcaacgacgtgctggccaaggggcacggccaaccggtcaacgatgccagccccgcgagcagcgacgtggccgtgttgcaatacaccggcggcaccacaggcgtggccaagggtgcgatgctcacccaccgcaacctcgtcgccaacatgctgcagtgcaaggcgctgatggggtccaacctcaacgaaggctgcgagatcctgatcacgccgctgccgctgtaccacatctatgcgttcacctttcattgcatggcgatgatgctgatcggcaaccacaacatcctgatcagcaacccgcgcgacctgccggcgatggtcaaggaactgtcgaagtggaagttcagcgggttcgtcggcctgaacaccttgttcgtggcgctgtgcaacaacgaaggtttccgcaagctggatttctctgcgctgaaagtcaccctgtcgggcggcatggccctgcaactggcggccgccgagcgctggaaggacgtgaccggctgcggcatctgcgaaggctacggcatgaccgaaaccagcccggtagccacagtgaacccgatccagtacacccagatcggcaccatcggcattccggtgccatcgaccctgtgcaaagtcatcgcggacgacggcaccgagttgcccttgggcgaaatcggcgagctgtgcatcaagggcccgcaggtgatgaaaggctactggcagcgtgaagacgccaccgccgagatcctcgacagtgaaggctggctgaagaccggcgacattgcgatcatccagcaagacggctacatgcgcatcgttgaccgcaagaaagacatgattctggtctccggtttcaacgtctaccccaacgagcttgaagacgtgctggcgaccctgccgggcgtgctgcaatgcgccgccatcggcgtgccggatgacaagtccggcgagcacatcaagatcttcatcgtggtcaagccaggggcgaccctgaccaaagaccaggtcatggaacacatgcgcgccaacgtcaccggctacaaggtgcccaaggccgtggagttccgcgatgccttgccgaccaccaacgtgggcaagatcctgcggcgtgagttgcgggatgaagagttgaagaagttgggccttaaaaagtaacccataaaaagccccgcaaatgcggggttttttgtgccttggattggaatgcaatccaatgtgggagctggcttgcctgcgatagcggtacatcagttaaaacagtgttggctggcccaccgccatcgcaggcaagccagctcccacagttttcatcgagtgcttacagggcgaactgcgcgaagctcacacccgcacccgccgggcgcacgtccttgaggaacgaatccttgtccgcactcagctccagggtgatctccggcttgcgcttgcccgcattgcgcaccaccaggccttcaagcttctcgcgcaggaacaccgtcggcaccttcaggtgcagcaactggtcggtctcggcgttgtgcatcaacaggtggatccactcgtactggcccacggcaatgcggcccagcggcaggtcgaaccaccagatgttgcgcttgtggtccaggtcggtgaagtggcagttgttgacgccgagtacggcaccgcccagttccaggtttctgcgggcgatggcctgtgctttattgagtttcataaccttcctacgggatctgttattcagcgttatagcctgaatgtgccgcgcattctcgtgggttggctgcaaaacataaagccaaacctgcgaccggcgatgaaatgcagcctgaaaataattgaaactctgctgaaccggcccgggtcaatctttacgtaatgacccaaaaccatcgattgttccaggagaaataccatgagcagcacatcggataaggcaaaaggtttgaaagacgagctggtcggcaatatcaagcaaggcgttggcaaggtcaccggcaacgacaaactgcacgctgaaggcgtggtgcaggaaaagaaaggccaggttgaaaaagccgtgggcgacaccaaagacgcggtaaagaaagccaccaagtaagcgttcaacctgcagcgagacggccatccacggatggccgtttttatgtcacaggctgcaactaaaaccctgtaattgtttcaaagtcgccaagtaggctacttttgatgtagaaaacggcccctgagtcgcccacgacctcatcctctttgcggcgaaaggagacgctatgatttttccggttctagacggcctcaagctacacaaagtgctgatacgcaccgtcaaggaattcgtcgatgacgaaatgcccacttacgcctcggcactggcctaccagatgctgttctcgctgtttcccttcctgctgttcctgattgccctgatcggtttcctgcacctgccggacttcttcacctggctgcgcatgcagtccgagctggtgttgccgccccaggcgctggagcaggtcaacccggtgatcgaccagttgcagcagtccaagggtggcttgctttcggtgggtatcgtgatcgccctgtggacggcctccgcaggtgtgcgcctgatgatgagcgcaatgaacgccgcctatgacgtcgtggaaggccggccgatctggaagcgttttccgctgtcgattttctacaccgtcggcattgccggcatgttgctcgccgctgccgcgctgatggtgcttggcccgcaggtcatggaatggctggccgggcagatcggcatgcaggaattcgtggtcaccctgtggacgatcctgcgctggccgctgatcgtgattctgctgatgttcgccgtggccctcatgtactacgtgatgcccgacgtagagcagaaattccgcttcatcaccccgggctcggtgctggccgtggtggtgtggatcgtcgcctccctgggcttcggttattacgtaaaaaccttcgccgattacaacgccatgtatggcagtatcggtgcgatcatcgtcctgctcctgtacttctatatttccgccgccgtgttgttgctgggcgcagaaatgaatgccgtgatcgaacacatgtcggccgaaggcaaggacccgggggaaaaggaattcgatgagcataccgacacggatgagaaacagcacgtctcaggccttggccgggaccactccaagcccactaccgacgaagtctgatcgatgatccgtgaaatcctgaaaatgggcgacgagcgcctgctgcgtatcgcgccaccggttccgccggaaatgttcgacagccccgagctgtggcaattgatcgatgacatgttccagaccatggagcacgtgggcggcgtgggccttgccgcaccgcagattggcgtcgatctgcagctggtgatctttggcttcgaagccagcgaacgctacccggacgcaccgccggtgccgcagaccattttgatcaacccgctgatcaccccgctgagcccggtgctggaagagggctatgaaggttgcctgtccgtgcccggcctgcggggtgcggtggaccgctatcaacagattcgctacgaaggctttgaccccaagggcgagccgattgtgcgggttgccgagggcttccacgcgcgggtggtgcagcatgaatgcgaccacctgatcggtcggttgtacccgtcacggatcaccgacttcaccaagttcgggttcattgaagtgatgttcccggatatggaccccactgccgacgactgaccgtcaggcgcaccgggatcaaactgtgggagctggcttgcctgcgatagcatcccctcggtctgcctgacaaaccggggtgcctgcatcgcacgcaagccagctcccacatttggatggcatttcaagtcgggttatttggcaggtttgacgaaccgcaacgtcatccggtccgactccccgatcgctaaatacttcgccttatcctgctcgccaaacctcagcgacggtggcaaggtccacaccccacccgggtaatccttggtgtccttcgggttggcattcacttcactttgcccggccagcttgaacccggcgtccgtcgccagcttcaccacctgcgcggtggtcaggtaaccgctgtccttgatcgcttgcaggtctgccccgtccttggcccggtggtcttccacacccagcacgccacccggtttcaacaccgtgtaaaacgcgctgaacgtagccggtgcggtgcccgcctcaacccagttgtgcacatttcggaaggtcagcaccgcgtccaccgacgcgggcttgccgaacacgggcgccttggggtcgaattccacgacttcggccttgccgtaacgtaccgggtcggcggcgaatttctttttcaggttctgttcggacgtcgccgcgtacgcgctggtgctggcggcctgcacggcggcgatgtaatgcccgtggtccttgagcagcggcgccagcacttcgctgtaccagccgccaccgggggtgatttcgatcacgctttgtttgccggccaggccaaagaattccagcgtctgctgcggatggcgatagccgtcacgcgcgctgttggccgggtcgcgccaactgccggcgagcacgttggcgtattgctgggcgctgatcggggcatccgccgcctggctcaaggccgggacgaggagggcggtgagggacagagctgcaagcgtctttttcatgatcgtcctgtaaggggccactgtgccagcgaggctagcacgggccctgttcgggccgatcacacattatccgcagtggtcctaaccaacggttctaagcgctgattttcaaacccatggcgatcatcggcttgttgcgtttatagcgcacccaccgttcgctgagggattggggcaacaccgtctcctgggtgaaccccatgcgctgatacaaaccctcaaggtccggatggcacagcagccagacgctgccttcaacatccttcaccgccttgccgatcaaccgcgccgccagcccctggccgcggtacgccgggtccacaaatacgccggtcaaccattgcccgccgaccaccggcgtcaggcacagcccggcgacaatttcgccatcgcgcgccacccacaaacgcccgcccttgagcgccttcatcgacgaatcatggcggcaataaaacttgttcagcagcggccacagcggctctgccaacagatcgagagtcaattcaggcatggtgttcagcaggcgtcatgaagggccggggattataagcgccttctgccgcccaataggtggtatacccagtgctacatcccgtttaagtggagtacgcatcatggccaaaggtatggattcaaagaaagccgcgaagaaaaaaccggcaaagaccgccgatgaaaaacgcgccgacaagaaagccaaaaagaccgagaccggcctgttcggtcactgagttacaagcttagaaccaaacgatctgcaagattttccggcctcaatgcacagagcaggaaacacctgctctgagctgccgatggccaactaccttgatctgacccaacgccgggaaatcgaagccctggcccgcagttttactgcccgtaccgaatggccgacctggctgttgttgatcggcgtgtatgccggctggtttgccgtgatcctgggcagccactggctgggtccatggttaagcacgctgttgctgatcccgctggtgacactctggctctcggtgcaacacgaattgctccacggccaccccacccgatcccttctggtcaacaaactgctcggctacgccccgtttgccgtgtggtatccctacaccctgtaccgcaacagccacctgttgcaccacaacgacgaagacttgaccctgccgggcatcgacccggaaagccgctacctgaaccagcttcaatgggacaacagctcgctgttcgagcggggtgtgcactggctgaccaaaaccgtgctcggtcgtttcctgctgtcggggcccttggcgattggtcggctggtgcgcaatgaatgccgacgcctgccccaggtgtggccgatgtggctggcccatggcgccgtgacgctgctgatgctgagtttcatcgcccattacagcgccttgccggtgtggcattacctgctgctggtcacggtgccggccttgtccctggcgtcgatccgttcctactatgaacaccgcccgcacccgcagccggaacagcgcacggtactcaacgaagcggcctggccgtggacgtggctgttcctcaacaacaacctgcacctggtgcatcacgacttgccgaaactgccctggtacttgctgcccacggtctaccatgcacgccgcgaccaatgggtggcgcgcagcggtggtttcctggtggagggctatggccagttgatcagccgccatggcctcaaggccatcgacagcccccggcacccttttgcgtgagagatgaccatgactgaccactacgccgaactgctgatgtacgtcgcacccgagcccgttcagcaggccaacgaacggtggctggcgcgtatcgtcgagcacttgaacctgcgccgccgtaacgccggccacctcgacctgcacagcctgtggctggcgcccgaattgctcgtcacgcaaacctgcggctacccgttgatgacccaactgcgcggccaggtccgggtgatcggccgcccgcgctacgagctggcccacagcagcggcggtgagcattgcagcctgctgctgacccgcgaagacaacccgcgcaccaccctggcgcagttctacaacagccgcggcgtgatcaacggcgatgactccaacagcggcatgaacctgctgcgcgaacgcctggcgcccttgcagcatggcgggcatttcttcgccagcgtcggcatcagcggtgcccaccgcgaaagcctgcgctggctgcgcgagggccttgcagatcttggtgccatcgacagtgtcaccttcgactacctcgcacggtttgccccgcaggaagtcgcggggctgcgcgtggtcacccgcagcgctccgagcccgaccttgccctacatcgggccgctgagcttgagtgaggacgacgccgcgcggatccgtgaggcaatgaaccagtcgttgcaggatttgccgcaggttgtcgaaaccctgggtattcaggaagtgctgcccgccagcgaagacgactacgaagtgttgctgggctaccagaggcaagccgccgacgcggaatattcggtgcttcaataaggttatataaaaataccttttaaatattattaaagaataagaggccttgttaggatcgctccaccggaacaccggacataacgcgcaacctactcagatggagccactatgtccggcgccgacacttctcacagcgattacgtgggcggattgttccgcagtcattacgactggctgtgcagccgtctgcaccgtcacctcgattcccgtgcgcacgccgaagacatcgctgccgacacctttgtgcagctgttgagttcaccgggcgtgctgccgatccggcagccgcgcgccttgctcaccaccatcgcccagcgcctgatgtaccaactgtggcgccgccgtgacctggagcgtgcctaccttgacgcgctggacaacgacgacatatccaccgccccttcgcccgaagacctggcgcaaatgctcgaagccctgcaagccatcgaccagttgctcgacggcttgccggccaaggtcaaggcgacctttctactctcgcagctcaacggcctgacctacccgcaaatcgccgctgaactggggatttcccagcgctcggtcagcgactacatggcccgcgccctcaaccgttgcctgcgcctgtgcctggaatgaacgacgaactgatcgacagcgccacgcgctggtacgtgctgttgcgctcgggccaggccacggcggcggattggcagcgttatcaccaatggcgcgcagccgacccgcgccacgatgcgctgtgccaacaattggaaacccgtctcggcgtgtttcagattccccaggcccaaggcgtcagcggccaagtgttgcagcaggcgctggatgcgccagcgagccgccgccacgtcttgcagatcgccttggcgggcgccggtgtggctgtcggcgcggcttttttagccaaacccatgggcttgtccgagctgacggccgatatccataccggtaccggcgaacgccgcagcgtcacgctggccgatggcagcgagctgttgctcaatgcgcaaagcgccgccgacatccagttcaacccgcagcagcgcctggtgcgcctgcgtgaaggcgagttgctggccaaagtggccagcgatcgcaaccgcccgtttttgattcagaccgaccagacccggctgcgcgcctacggcaatcgctttctggtacgcgagcgcgaagggcagggccaggtcgtggcgctcaatggcgcggttgatattgacgaccagcgcggcgaacgcttgcagctcgccgccggtcacgaagtgcattacgaccgctcgggttttggcccggtcgaagccagttcatccggtgccaccgcgtgggtcgatggtttcctgcaagtgcgcgaccgcccgctggccgaagtcatcgaggcgttgcgcccgtatcacaacggcgtgttgcgcctcgaccccgccgtcgccggcttgcgtgtgagcggcctgtatcgcctcgacaaccctcagcaaatcctcgacaccctggcgcgcaccttgcccatccacattacccgccgcactggcttgtgggtgaccgtcaatgccgcctgacggattcactcagtccctgtgggagctggcttgcctgcgatggcatcgacccggttcaactgtcagcccgagtcgcctgcatcgcaggcaagccagctcccacattgaacgggttttcactttaaaaccgggttctaaggacataaccaaacgatctgcaagttttccccccgccggcccacatcactcccgtaagcgctgcggggagcagcgttcaggagttctcttggggggagccaatgtgagtcagttcaaccgtgtgccgcttcgaacctttgccctggtgccgttggccagcctgtttttctcgtttgccgccagtgccgaagaggcgcgccaggtctaccacatcgcccccggcccgctggatgaagtgctgctgaacatcagccgccaaagcggccaggtgatttctttcacgccgcaactgggcaattactcgtcggccacggtggacggctcgctgtcggcgcaccaggcggtggacgccgcgctcaagggcaccggcctgcaagtgcaggtcagcccggacggcgcgttcatcatcaaggaaggcgcgagcaaagcggcgaccagcgacgtcaaggcacaaaccagcgccgcccaggcaccgaccctcgaccgcgtggtcgccatcggcacccgtcgcagcaatgccaccgcgctcaccagcagcgcgccggtagacgtgatcaatgccgacgagctcaagcaaaccggcgccaccagcctcaaccaggcgctgttccagctgctgccgtcgttcaactttccacagaacaacagcgccacgcgcgggcaagacccgaagggcgcgtctctgcgtggcctgtcgcctgaccagacgctggtgctgatcaacggcaaacgccgtcacacctcggcggtggtgaatatctccggcggtgtgccgttcattggcgcccagccggtcgacctggacatgatccccatcagtgccatcgaccacgtcgaagtgctgcgtgacggtgcctcggcgcagtacggttccgatgcggtggccggcgtggtcaacatcgtgctcaaggagcgcgacagcggcggcggcatcaacacccagctgggcaaatacgctcaaggcgatggtttcagcaaaaccacggacggctggtacggcgtcggcctgccgggcgatggtttcctgaccctgagcttcaacaccctgaacaacaagcctgatgatatcggcgacaaatacgtcgccgacggccgggtgcaagacccgcgctggggcggtgccgggcgcgacaaatacaacctggccgccaacgccgaaatcggtctgaacgaccaatggcgcctgtacagcttcgccacgttcggccaggacacttcggtcaacaacacgccgccgttgctggcgagcagcccgaacaacgtggcctcgatctaccccggcgggaccattccgaaataccgctaccgctacgaagacggcgccgtcaccgtgggcacccgctatgaagacgagtccatcggccgcttcgacctgagcgccacctacggtcgcgacgagcatgacgagttggctttcaacaccgtcaacccaagctacggcgccaacagcccgaccaaattcaacgtggccacgctggtcaacgaccagaccaacatcaccctcgattacgccaaggacctcgacgtgaactggtccagccacccgctgaccgtgtcgggcggcgtagcttatcgtcatgagcaatatcgcctggaagcgggcgattacgactcgtactcctttggcgggatcgatggcgtgcaagtgggcgcggtgcaagcttccggcctgaccccggacgatgccggcaccttcaagcgcgatgtgggcggcgtgtatttcggcctggaaaaccaggtcaccgacaagctgcaagtcggcgttgccgggcgtaccgagcactactcggacttcggttcggccaccaccggcaagctctcggcgcgctatgacttcaccccgcaagtcggcctgcgcggcaccatcaacaacgcctaccacgcgccaagcctgggccagatcggcacctcgtggaccaccaccaccaacctcgacgccaacggcaacccggtgctgacgcgcatgctgccggcggacaacccggcagcccgtgccctcggcgcgcaaccgctcaaacccgagaagtccaccaactactcgctgggcctggtactgcgcccggctgaaaacgcctcgctgaccatcgacgcctaccagatttcgatccgcgaccggctgctgttcagcggcgggatttccgggccgttggctgagcagatccttaccaatgccggttacggccagtactcctgggcgcagttcatgaccaacgccgccgacacccgcacccgcggcgtcgacatcgttggcaagtacaacctggacctcgcgcagttcggcaacctggcgctgtcggccggctacaccaaggcgcgcaccaccatcgagaaaatccacgaaaaccccaatggttttgaagtgctgacccgcgaagcccgtggctttatcgagcacggctaccccgaagacaaactggtgttcggcgcggtgcacaagcttaaccagtggacgattgccctcaacgaaacccgctacggcaaataccgcaaatacgcggccagcgaggccaatgcccagtacgaccaggaattcagcgcgcaatggaccaccgacctggacgtgaactatgcgttcaccaagcaactgcgggtgtcggtgggcgtgaacaacctgttcgacagcaaacccgacgacttcaacagccgcctgcgccagacgccaggccagcaatacagctacctgtcaccgaccgcgccggaaggggcgttctactacacccggctcagttatgacttttaagaacatggcgtagatcaactgtgggagctggcttgcctgcgatggcatcacctcggtaccactgaaataccgaggtgtctgcatcgcaggcaagccagctcccacatgaccgtgcccgctttgaatctgttgtgaatcgaatctccaagaggctactcatgagaacactaaaaaacctgctcggtggctcgctgctggcactggccgccctgacccaacaggcccacgctgcggacgcggtcaaacccatccacttcggcgacatcacctgggaaagcggcagcctgatcaccgaagtgctgcgcctgatcgtcgagaaaggctacggcctgcccaccgacacgttgcccggcagcacggtaagcctggaagccgccctggccaaggacgacattcaagtgatcggcgaagaatgggccgggcgcagccccgcgtgggtcaaggctgaaagtgaaggcaaagtcttcggcctgggcgacaccgtcaaaggcgccaccgaaggctggtgggtgcccgaatacgtgatcaagggcgacgccgaacgcggcatcaaacccctggcgccggagctgaaatcggtggccgacctggcacgttataaagatgtgttccgtgaccccgaagacccaagcaaaggccgcttcctcaacagccccaccggctggacctcggagatcgtcaacagccagaagctcaaggcctatggcctgaccgacaccttcgtcaacttccgcaccggctccggcgcggcgctggacgccgaagtggcctcgtcgatccgacgcggcaaaccggtgctgttctattactggtcgccaacgccgctgttgggccgcttcaaactggtcaagctggaagaaccaccgttcaacgccgacgcctggaagaccctggccgacgccaacaacccgaaccccatcggcacccgctcgctggcggcgcacctggcgattggcgtgtcggcgccgttcaaggcgcagtacccgcagttggtgagtttctttgaaaaggttgacctgccgatcgacctgctcaacaccacccttgcgcacatggccgagaaacgtgagcaaccgcgtcaagtggcgctggcgttcctcaaagagcagccacaagtctggcagcaatgggtgccggcggatgtggcggccaaggtcaagggagcgctctgatgcttaaagtcctcgctgccgttgttctgtcgctggtggccggccatgtgctggcggccgaaccttccacactgcgtatcggctaccagaaaagctcggtgagcatggtgctcgcccgtgaacacaagctcttcgaagcggcgctgcccggcactcaggtgcagtggatcgaatttctcggcggcccgccgctgatcgaagcgctcaacggcggcagcctggacatcggtaatatcggtgacatcccgccgattttcgcccaggccgccggcatcgagttgcagtactttgccgtcgagcccaacgagggcaagaccgaagcggtgctggtgcccaacgccagcccgattcaaagcgtggcccagctcaagggcaaacgcgtggcgctgctcaaaggctccagtgcacacaacctgtttctcaaaagcctgctgcgcgcgggcttgcagtggaaggacgtgaacgtggtgtacctgtcgccgtcggacggccgtgctgcgtttgaacaaggcaaggtcgacgcgtgggtggtgtgggacccgtactactcggccgccgtggtcgacggttccgcccgtgtgctgggcgacggccagggcctcaacccggccggcagcttctttgtggtcagcagcccgtttgccaaacagcatccgcagtcaatcgccacgatcatccagactttggccaaggcgcagcgcctgtccctcgaccagccggaacaaagcatcgccctcatggccaagacccttggcttgcaaccggcggtggtgaaaagctatttcgaacaccgctcacccgcaccgatccgcccgctggaagcggtggacgtggccaaccagcaacgcaccgccgacctgttttttgccaatggcctgattccgaagaaggtcgacgtacagcaggccgtgttcaaagccccgtgacactgcacttctgtggcaagcccgctcgccaaaggaagcgggcctgccacaaaagtcgctaaaacctttaatcagtgagcagaccatgcaaccgatctacatcgactttctcaacggcctcgacatcgacgagctgaacctgggcaacgacgaaatcctcaacgccatcgaagccagcctggcgatccagggccggggcgaggcggtgatcgagccgcgcacccacctgattccgggcggtggcatcaacggccacttcaacgtgctgcgcggtgtgctgggcggcgacatcggctacgcgggcgtcaaagtggtgggggattttgtcgataactaccgcaaaggcctgccttcggagttggccattcttaacctgctcgacccggccaccggcattcccaaggccattctcgacgcctcggcgatcaccgatatgcggaccggcgcggtgacggccatcggcgccaaatacctggccaaacccgacagcaaagtgctggcgcacatcggcgcgcgcggcacggcgtattggaacgtgcgcttgctcgatcacctgttcgacttcgaggaaatccgcgtgcactcgcgccgcagcgaaagccgcgaagccttcgctgaacgcctgcgccgcgacctgggcaaaccggtgatcgtcaccgacgactgggaaagcaccgtgcgcggcgccgacatcgtggtcgaggcctcgcgcctggatcagcccgagccgttgctgcgcaccgactggatcaaacccggcgcttttgtggtgccctacggcaccatgagcgcggtggagttgtcgctcaccgacatcatgagcaagttggtggtcgacgattggggccagtgcaagggcggcctgtttggcgctttgcgtgcccatgtcgacgccggaaaactcagtgccgacaccttgcacgccgagcttgggcaaatcgttgccgggctgaaaagcggccgggaaaaccccgaagaaaccatcctgttctggcaccgtggcctgagcctcagcgacatcgccctgggccatgcgctgctggaaaaagccaagcggctgggcattggccagcggctgcgctgggcatgattgagcttgatcctcaaggccttgcgctcgcgggtttactcgcgattgcgcggcaagacagccccgcggatttcactgcacaggcacgccagcgtatcgacgacggccaccgattactgctgaaactcgtcgccagcggcacgccgatttatggcgtgacgacaggccttggggctgcggtggatacgccggtgacgcctgtgcaggcgagcattccattggggcgtgcggtcggcgtgggccgcttggccaaccggcaagagttgcgggcgattacggccgcgcgcttggcgggtttggctcaagggcgctcgggtatttcacccacggcggcggatgccttgctggatttgctcaactcgggtatcgagcctgaagtgccgttgctgggctccttgggcgaaagcgatctggcaccgctggcccacttgagcctggcgctgtcggtgccgttgaccggcaaggacggcctggtgctcgtgtcggccaacgcggccagtgtcggcttgggcgcgttgttggtggccgaggtagaacaggtgttgcacgccttgctgtcggcgctggcgttgtcgtgcgaaggctatcgggccaacctcagcccgttccagccatgggcttcacgcttgcgcccggcgcctgggcaaaccgaacaatcggcggcgttgttgcaattacttgaaggtggcgagttggcgggcagcccacgccgcctgcaagacccgctgagttttcgctgtgccacggcggttcaaggcgctgcgcaacaggcgctgcaacagttgcatgatgtggtcgagctggagctgcgcagcggcgcggacaacccggcgctgatcagcgaggagtcgttggtgttggccacggcgaatttcgacagcacgcatctggcgctggcggccgaagggttggggttggccttgagccgggtcgccgcgtgcagcgccgagcggattgccaagctgctgtcgccggcctcaagtgatttaccgcgctttctgatcacccggccggggcacgtcggcatggcagccttgcagcgcaccagttcggcattggtcgcggagatcgggcatttggccaaccccttgccggcggtcagcgtgccagtggcggatcgggtggaagactatgcggggcaagcgctggccgtggtcgacaaaacccggcggctgaccgagcgggtgttgtggttggccagcatcgagctgatcgtagctgcgcaagcggtggatttgcgcggagcactgcaactggggcagggtacccggcagatccatgaagcggtacgcagccaggtggcgcacctggatcaggatcgttcgggttcggtggatgtgttggcgttgagtgcttttatcactaacaaccacctgaacccctctttctaaatcaatggagatcaactgtgggagctggcttgcctgcgatagcggtctgtctgatgtaccgctatcgcaggcaagccagctcccacaggggattgcatttcagatcaggcggcttcggcagccaacgcagcggttacggctgggcgttcactcacccgctgctgaaacgccgccagcgccggccaatcacccagatcaatgtcgttgaaggccgcccagcgcagcaccacaaacaaatacgcatccgccaccgaatacgccgggcccaacagataatcctgacgctccagcgcctgtaccagcaccgcaaaacgcttgaacagcttggcctggaacatcgcccgcacttcaccttgaatcaccgggttgaagaaaatcgccaacccgccatggatttcggtggcgataaagttcagccactcctgcaaacgcacgcgttcccaactgccattggccggtgccaggcccgactcaggcttttgatcggccaaaaattgcaggattgcactggcctcggtcagcacctggccattgtccagttgcagcgcggccacatagcccttggggttgatctgcaggaagttgtcgccatgggctgtggttttggtctggttatccacccgcaccagttcgaacggcagcgccaattcccgcagcacgatgtggggggcgagggaacaggcgtgggggaagaaatacagtttcatctaaaggcgctccgttgaatttgcgccagtctcgcgggcatggcaccgtgcgtaaaattaaaccttcagaccccatccataaggacggctactgccatgatgaacctgatgcactggcgcctgctggtggcggtagccgatcacggcagcattaccgccgccgccgagcaggtgggcatgacccagtccgcggccagccaggccatggcgtccatggaaagcacgctgggtgcgcaactgtttacccgcgaaccgcgcaagaccttgcccaccgccttggggctgagtgtgatcgagcaggcgcgggtgatgatgacggcgctacagaccattcgcaccaccgttgacgaagcacgccccttgctgcgagggagcattcgcatcgccagtttccccatggtgctggcgacgtttctgacaccattgctgcaacgtttccggcaattgaaccccggtatcgacgtcaccacgctggacgttacggacagcgaagtacacaccttgctcgacgccgacctgattgacttgggcgtggtgctcaaccccaagcccgagcgcaatgccacggtgctgggccgtgacttctggatggcggtgctgcctgtcagtcacccttttgcgaagcgcccggctgaggcgaccgtgacgctggccgagctgctggagcaacctttcgtgctggctaccggcggctgcaccgccaacgcgcgcagcctgggcacggcagcggggctgaccctgagcgatattcgcgtggaagtgcgcgaatggaacagcgcctacagcctggtgcgcgagggcgtgggcgtcacgctggtgccggaaatggccctgccggcccaacgcaacggcctgcgcgtgatgccgttgacggagccgttgcaccgcgaatttgccttggtcggttcgccgacccgtgcgccttccgccgcggtcagtgcattgttaaaaatgctcgctgactagtggccttgcatagcgccaagccctgtctatgctgactcagaaccgttgatgacgtttggcatataaagcgtttcggatggttatttccccatgaaggtttgccagcactatccaaaaaatgaatggaatgcgccttttcggcgccgggaatcaagggtgatctgaccatgtttaaccgccagcacaaatccgacctgctagaaatcgaacgtttctcctgcgccctcaccgaagccaacgccaaactcgccgccatcagccgttccatggcgatgatcgagttcgaccgcaatggcgtgatcctcgatgccaacgaaaacttctgcaacgccatgggctacagcatcgaggacattcgcggcaaacatcaccggatcttttgcgaagaggcctacacccacaccgaggcctacgccaagttgtggcgcgacctggcgcggggtgaagcgctgagcggcaccttcatgcgcctgaacaagcgcggccaggaagtgtggcttgaagccagctacatgccggtgcttgatagccacaaccaggtacagagcgtgatcaaagtggcgtcggatatttcaacgcgcgtgcaccacgaacatgaaaaccagagcctgatcgacgccatcagccgttccatggcggtgatcgaattcacgccccagggccagatcctcaacgccaacgacaacttcctgcgcaccgtgcagtactcgcgtgaagaaatcatcggccagcaccacagcatgttctgccatcgcgccgaggttgaatcgccggcctacaaggcgttctgggcctcgctcaaccggggcgaatatcactcgcaccggtttgagcgtaagaacaaatacggcaaaaccctgtttctggaagcgtcctacaacccgatcttcgacaccaacgggcgcctctacaaagtggtgaagttcgccagcgacatcactgaccaggtgaccaccctgcgcaccgccgccgattcggcccacgccacgtcggtacaaaacgacgcctgcgcgcgcaagggctcggaggtggtgcagcaaaccgtgcagatcatcgaagaaatttcccacgacctgaatcaggccgcccagagcatcgacgcggtgagcaagcagtcggacatcatcggcgccatcgtgcagaccatccgcagcattgccgagcaaaccaacatgctggcgctcaatgcggcaattgaagcggcgcgggccggcgaacacgggcgcggttttgcggtggtggccgatgaagtgcgcagccttgcggcgcggacgagccaggcgacggtggagattgtggacgtggtgcgcaagaaccacgacctgtcgctgagcgcggtgtcgagcatgcaatcgagcttgagccgcaccgggctgggggtggaattggcgaacgaggcggggcaggtgatcctggagattcaggaaggctcacggcatgtggtggatgcgatcagccagttcaactcgacgttgcagttgcagtaaacccagagtttatgtgacaacccgatccatgtgggagctggcttgcctgcgatgcagacacctcggtgtaccaggtaaaccgagttgatgccatcgcaggcaagccagctcccacactgcttagatcgccgccagggtttctttcactgcctgcgccgggtcactgcttttcgcggctacttgctgctcttgctgctgcttcacccgatcagccacttccttggcaatcgcgtcttgtttttccttcggcatggcttgcacttcggcttccgtcaaaccctgctccttgagcagttgttcgcgaatgcgctcggccggcgttttgttcatgtaatcggtgaagtcagcacgcgcggtgctggaagaggaaccgctggctggcacatccgtggccggtggggtggccggtgctgacgcggccgtggtggcttgcagctgtacgcgcgtcttggcgaacgcttcgtcgatgcggtcgttggccttgtccagttgcgtctgcgtcgtcggcaccgtgaccgattgttgcgccgcttgcagggcgccactgtacagcgtgctggcggcggcgttggccgggtccaggtcggggcgcttgagctgttgtacggtagatgcagcttgggtgttgttgttgatcagcatgattgctcacctgggatgtgttcggtccgacaggttgagcaaatagcatgccgggatcgccacccccggttttattggggatggcctggccggcgcggcaatgattgtcccgccggcggccaacccttgccgtcagtgggcgatgttctccagcgccaggttgcgcgtgcgcggcccgaaccaactgatggtgatcatcacgatcaacatgctgctggcaataaacgccagcacgcccggtgtgcccaggtgttcgaggataaaaccgatcaacaaactgctgaacaccgtggataaacggctgaacgaatagcagaaccctaccgcccgcgcgcggatattggtggggaacagctcgctctggtaggagtggtaactgaagctcagccaggcattgcagaaggtgatcatcacgccgcagatcaccagccccaccgccgtggtttgcagggcgaacaggctgccgaacaccatggcgcccagggccgagccgacaatctgccatttgttttcaaaacggttggccaccttcacaaacagcaacggccccagcgggtaggcgagggtgatgatgaacgcgtagagcaaactgtgggtcacgctcacgccttggcccgacagcagcgccggcaaccaattgccgaagccgaaaaagccgatggcctggaacacatggaacacgatcagcatcaacgcgcggcgccggtacggcggttgccagatatcggcaaaacgcccgttgccctgcacgctgacggcttgcggttcgggcgtgtccagcggcttgccgtgatccttctcacagcgtgtttccaggctgctcatgatcacatcggcttcgtcaaagcggcctttttgcgccagccagcgcggtgattccggcaagcgcttgcgcagttgccagataaacagcgcaaacaccgcactgctcaacaccaccaggcgccagccggaaatgccgaacggcgcctgcggcaccagccaccatgacatcaacgccaccgccggcaccgacagaaactgaatgaaaaacgcaaaggcaaacgcagagctgcgcatgcgtttgggcaccagttccgagaggtaggcgtcgatggtcaccagctcaatgcccaggccaatgcccaccagaaaacgcatgcagatgatgcccatggccgaggtctgaatgcccatcagcaccgtggcgaccgtgtaccagatcaacgcgaaggtgaagatcgcccggcgcccgaagcggtcggcaatcgggctgagcaggctggcgccgaggaacaggccgaggaaggtcgccgaggcgaacgcggcctggtcggagaagccgaacacgccctcgctgccggtgtgaaagagcccgtcgctgatcaggccggggctgatgtaggcggtctggaacaggtcgtacagctcgaaaaagccgccaatcgacagcaacgccaccaggcgccagagcgttgcaacggcgggcaggcggtcgatgcgcgcgctgatatgggcggcgcggaccgggtcgatgccgtcggcggttgagagtgcaggcatgaaggcaggctcagtaggtgatcgggatttcgaaggtctggaacgcatcgtccacgggttggtagcccagcacgcgcgtggtttcgctcaggtccaggcgtttgaaacggttattggaaatgccgtgggcgatcaggtgttttacgccttcggcttccacggaacgctgcagcagttgcacggcatcacgcgggctgagccaggcgctgaggtcgcgagcgttgttcaggtcgtgggtctcgggaaattcgaaggcaccgatgcgcagagcaatcgtcgacagtggcgttttggccgcgtaatagctgcacagcgcctcgccgtagcatttactcacgccgtacaggttggcgggcatcaccggcatgcccggcgtgatctgacggtccaccggatagccttcgatggtttgtgcgctgctggcaaacaccaggcgttttaccccagcggccacggcggcttcgaacaggtaagtggtggcgaggatattgttgggcagcaattcgtcgaacgcggcgctggcgtgggggatgcctgagaggtgcacgatcacgtcgatgccgtcgagcagggccgtgaggccggatttttcgctgaggtcggcactgatgaaacggtgttcgcccaaagcaaaatccggcgcgatacggtcggtgagggtgaagcgataacggtctttcgaggcttcgaaaaacgtcttgccgattctgccgcaagcgccggtaagcagtacgttgagtcctttcacggtgaatccttgttttagttttagttatggccgtcgagggcgaaagtcttgaagccttggcgcccgctcaggcgctggtaataggcttctacagcggggtagggcggatgctccagcggcgcgttgcgccagcggtgcacggagaggccgacgagaatgtcggccagggtgaattcgttgccggccacataagcaccggtcttgagcagttgctgctcgagcaggcccatcttgtcattccaggcttgcacgcccgccttcagccgctgcgggtcctggtaatcagggtttttgcgcaccagtgcgtggaaggcgtaaccccacgacgggttgagttcggtggcttgccagtccatccattgctccactttcgcccgtggcgcgggttcggcgggcagcaggtcgtagcgctggtaaaggccgacgaggtagcggcagatggtgttggattcccacagcacgccgtggtcgtcgatcagcacgggcacttgggcgttggggttcagggccaggaactgcggggactgggtggggctgaaccccgtgccccagtcttcgcgggtgtagtcgatgcccagttcctggcacgtccacaggacttttcgcacgttgatggaggaggtgcgacccaagattttcagagaatgtcccatggtgctttcctggcaaaggagatgacccatgggaatctaacagcggtgcccggttggcgctacgcagatgttgccggcagcgccgaggcaggcaggccgaaggtgcggtcgaacagccagttgaaggcaaaggtgtagcaggggatgaacaggatcagtgccaggtcgagcaggaaggcttgcaccaggctcacgttcatccaccaggcgatcagcgggatcaggaacacgatcagcgtcaactgaaaccccacggcatgcgcgatgcggcgtttgaccgtgcgcgtgcggtcgcgctggcggctttcccagcgctcgaacagtgaggtgtagatgaaattccaggtgaccgcgacggtggtgattaccacggccagcggcccggtgctggacggatgcgtgcccgacagcagcgccaggccgagggccgaaaaggtcatgccgatcagctcgaacaacgacacatacaccagcttgcgtttcacgccttgcataccacttcctcttttttcgggtgacaggaacgtctgatggcgcggaagatagcgtcaatgtggctgacacaaaaagtcagaagctttcagttttattgacaggtggcgtaatgagcttttccagtgacagcgttgaagtgttcctggcggtggtcgagcgcggctcgttctcggcggcggcgcgggccttgggcaaggtgccttcggcggtgagcatgggcattgccaacctggaggccgagctgggttacccgctgtttgatcgcagccatcgcgagcctgtgccgactgacttggcattggcgctgattccccatgcgcggttgatggccgagcaactcaagcagttgcaggtgcacgcgttgcagctgtctcaggggctggagagcaagctgtcgattggtgtgggggtggacatcaacacacggcgcttgctggccgccatcggtgacatcagcgagcagtttccgctgctggaaatcgaagtgctgaccgccccgcaggatgatgtgttgcagctgctgcacagcgggcgtgtgcaggtttgcgtggtgtttgccgggttacgggtcaatgtgctggagcggcttcagtttgttggcagcgagcagttgatcgcttgcatcggcccgcaacatcctcaggccgctggcgagccgtatctggaagatctggtgcgggtgcggcagattctggtggcgggtcgcgatagtcccctcagtgaccgccggccgctggtggggcagtcgtactggcgcaccgacagcctgggcatggcactggacatggtcgaagcgggcctgggctggggcaatttcccgcagtcgaaggtggcgccgttgctggaagcagggcggttacggcggttgaacttcaagaacatcgagaatggcttggcgatggtggtgaacgcggtgtggttgaagaaccagccgttgcagaagggggcgtcggcgctggtagcgcgccttgcttcagcggactgaccccgccctcaagcgggcaccgtcaatgtgggagctggcttgcctgcgatagcggtagaccagccagcccatcaccgccagatacaccgccatcgcaggcaagccagctcccacattttgattgtggtgggtttagggaagtcaggtgctctcgcgcacctgcaactcaaaccccatatccaccaccggcttggcgattttattgccggccatgatcgtcaacaagtgctcagccgagcgccgcccgatcgcttcacgcggcgtactgatgctgctcaagcgcggcaccatgaaagaggatgccggcaagtcgttaaagcccagcacggccacacgttccggcacttttatgccgtggcgcatggcctccagcagggcgccttgggccaggtcgtcgttaccgaagaagatcgcatccacatccgggtgcgctgccagcagttgcaaaaacaattcgccacccaaacccacggaagacggacgcggcgtcagcaattccagcgccgggtcgtacatgcccgcctgttgcagtgcgcggcggaaaccctcgccacgcagcaacgtacgctggtccagctgcgcgccgatatacgccaggcgcttgcgcccacgggacagcaaatgcgccgctgccgtttcacccgcgttcaactgcgagaaccccacgcagttcacacctgcattcgggtccaggtccatcatgtacacacacggcacattgctcgcttcgaccattcgccgtgcgctttcggtgcggtcaaacccggtcagcagcaaaccacgcggctggtaggccatgtagttgcgcagcaggttttcttcttcgtcacgcgaatagtgggaattgccgatcagcacttcaaagcctttgggccgcagcacttggtggatagcctcgagggtttcgatgaacaagaggttcgacagcgacggcacgatgaccaccaccgagtggctttgtgccgacgccagcgcgcgggcggcggggttgaccacgtagttgagttcggcagcggcgtgctgcactttttccaccagttcggtggcaaccgtgctgatgccacgcaaggcgcgggaggcggtaatcgggctgacgccggccaggcgggcgacttcattgagggtcgggcgacccgtggtgcgcaattttttatcgttcttggaggtcatcagacggcttgccaaacaaaaatcgaggcactaaggtagcgctgtctccaaatggctgcaaattcttgaacaaagggttgcctgatcctgttcaaaccgttggagcggatgcacgcgtcactccataaaaatgacaagacggcgcgggaaaagcctgtttttgcactagccttacagcgtgcaaaggtagcgctatctgcgtcctgaggtgtttcatgagtcaacctgttaccgccctggtcatcatgggtgtttccggctgtggcaagtccagcgtcagcgaagccctgtgccgcctgaacggcgccaccgccattgaaggcgacagctttcaccccgccgcgaacatcgagaagatgagcgccggccaccctctcaacgacgacgaccgcgccggctggctcgacatcctctgcgatgaactgcgccgctcgctcaaagccggcgagcacccggtgctcacctgttcagccctgaaaaagaaataccgcgaccacctgcgcgaagctgcgccaggcctgggtttcgtgtttctggagctgacccgtgccgtggccgccgaccgcgtgtcccatcgccccggccatttcatgccggcaagcctgatcgacagccagttcgccaccctcgaatcgcccgtgggcgagccgctgaccctggcgctcaacgccagcgaagacagcgtcgaggccctggccgagcaaaccaatgcctggtggctgcaacacggctttgaaccaacccattaattttttgccggaaaagatagcgctgtccccggcgaaagattcaacaccggctttaataacaacaacaaacaggagagaccccccatgtttggcatgtcccacgagtcctacctgctgctagacgcagtggtcactatcatcgggctgatcgttctgatcaccaagttcaaggtgcacccgttcattgcactgatcatcgcggccggcttcctcggcctgacctcgggcatgcccgtggacaagatcatcaaggcattccaggacgggtttggcggtgtgctcggctttgtcggcatcatccttgcgctgggtacgatgctcggcaaaatgatggccgaatccggcggcgccgatcagattgcgcagaccctgattcgcgctttcggtaaagagaaagtccagtgggccatgatgttcgccgcgttcctggtgggcatcccgctgttcttcgaaatcggctttgtgctgctgatcccgctggtattcatcgtcgcgcgccgtaccggcgtgtcgctgatcaagatcggcatcccgctgctcgccggcctctcggcggtgcacggcctggtgccaccgcacccgggcccgctgctggccatcggcgtgtttggtgctgatattggcaagaccattctctacggcctgatcgtcgcgctgccgaccgccatcatcgccggtccgattttcggtacgtttatcgccaagtacatcccgggcaacccgtcccaggaactggtcgaccaactggcccgcgagccggagtccaaagacctgccgagcttcagcattaccctgattaccgtgctgctgccggtgttcctgatgctgctcaaaaccttcgccgacgtcgcgctgccggacggccacgccattcgtaactggatggacatgatcggccacccgatcaccgcgttgctgttggcgttgctgctgtcgctctacacctttggccatcgccaaggcattcattccaagcagatcctcaagctgctcgacgccagcctggcgccgacggccgcgatcattctgatcatcggtgccggtggcggtttcaagcagatgctggtgaccagcggtgtaggtgacgtgatcggccatatggcggtgaacgcgcaaatcaacccgattctgctggcgtggctggtagcggcggtgattcgtgtggcgaccggttcggcgactgtggcgaccattaccggcgcaggcattgtggtgccggtggtggggatgattccgggggttaaccgtgaactgctggtgctggcgacgggggcgggctcgctggtgttgtctcacgtcaacgatgcggggttctggctggtgaagcagtacttcaacatgaccgtggtcgagacgttcaagacctggacggcgatggagaccattctgtcggtggtggcgttgattttcatcatgttgctgtcgttggtggtgtaagccacaccgcgaaactcgatgtgggaactcgatccaaatgtgggagctggcttgcctgcgatgcaaacacctcggtgcttctgatgtaccgaggtgatgctatcgcaggcaagccagctcccacactttcagtgacttaaaagtcaggctttggtgaccaaaccatccgcccgaaacatcccgcgaatcccgcgcaccgcctggcgaatccggtcctggttctcgatcagtgcaaagcgcacgtgatcatccccatactcgccaaagccgatccctggcgacacacacaccttcgcctccagcagcaacttcttggcaaattccagcgagcccatggccgcatactgctcgggaatcttcgcccagacgtacatcgacgccttcgggttttcgaccatccagcccagctcatgcaggcctttgaccagcacgttacgccgttgacgatactgctcggcgatgtctttcacgcactgctggtcgccttccagcgccgcaatcgccgcaacctgcagcggggtgaaggtgccgtagtcgtggtaactcttgatccgcgccagggcgttgaccagttccgggttgccgaccatgaaaccaatgcgccagccggccatgttgtagctcttggacagggtgaaaaattccaccgcaatgtccttggcgcccggcacctgcatgatcgacggggctttccagccgtcgtagacgatgtcggcgtaggccaggtcgtgcaccaccagcacgtcgtactgcttggccagggcaatcacgcgctcgaagaaatccagctccacgcactgcgcggtggggttggacggaaagcccagaatcatcattttcggcttggggatcgagccacgaatcgcccgctccagctcggcgaaaaagtccacgccagggatcaacggcaccgaacgcacctgggcgccggcaatcaccgcgccgtagatgtgaatcgggtagctggggttgggcaccagtacggtgtcgccctggtcgagagtggccagcatcaagtgcgccaagccttccttggaaccgatggtgacgatggcttccgactcggggtcgatgtccacttcataacggtccttgtaccagcgcgaaatcgcccggcgcagacgcggaatgcctttggaggtggaatagccgtgggtgtcttcacgctgggcgacggtgaccattttttccacgatgtgtggaggcgtggcgccgtcagggttacccatgctcaagtcgatgatgtcttcgccgcgccgacgcgcagccatcttcagctcggcagtgatattaaaaacgtagggggggagtcgatctatgcgcgcaaagcggcgcggcgaaccttggtcggccattgttgcctcgaaatacgtaagcgcccggaaccgtccgagcgacgtcggccactgcggtggcctgcggggcagacaatacggtcgatgatggccagttgtccagatgcgcaggaaaaatttctgcttggagtaaggcgcgcatatccccctatactcgatgcgggtttgttccctcataagaaggagactgttcgtatggatcagcagacaaaacaaccgttagagccacgcatggaagcaggcaaggcactggtgattgccggtgtacaagggcgttactcgaaggccaccctcggcgacattccaaagctgtgggagctgttcgacacctgcatcaacgacatcaaaaagcgcgtcggcggcgtgacttacggcgtgtgccataaccccaaaaacggcgagttcgattacctggccggggttgaagtaccgagcaagagcgacgtgccgggcaactttgaatctgtcgaaattccgccgctcaactatgccgtgttccctcattacgggccggtgcaggcgttggagcaaacgtatgagcgcatcatgtttgagtggctgccgcactcgggctacaaggtgatgggcgcggatttcgagcgctacagcgccgactttgacgcgcgcaaaggcaccgggaccgtggagatctggttgccggtgggagagcggggctgactgcggttactggcaagagccggctggccggctcttgttgtcgtctcaaacccacgaggtgcttatttcccggctgaactcatcaccagcgccagccggcgttcgtaacctatacgccctttatacgcctccccggcatccacccacccagcccccagatacaaccccatcgccgccacattgtccgcgtccaccgacaactccagcgccttgatctctggccaggcttgccgcgccgcctccggcagcgcctgcagacaggccttgccaaacccccggccctgttgcgcgcgatccacttgcagcgcgtgcagcgtggcgctgtgtgcatttgcccagtggggcaggcacggcggccgtttgagcagcaggaaagccacgggggtttcatcggcgagcagggcgaagcccttgacggcggcggggttgggattgaccagcaagctgttcagcgcgcagtagatatcgccggaatatgccagttgctcgggatgcacttgcagggtgtcgagctgctgtttttgcacaaggttcagcgtctcatagggaacgaggcgggtttccatcgggggtacatcccaaatcctacaaagaggcgtggattctagcggctttgccgaggacgaaattatttttcagcgggctgtcgatttgccgagaagccattcgactaaaggtgtcttccgtgatttttcaccccaaggagcatcgccatgagcactgccatcaacaccctgatcgagcaatggaagcaagccgtactggcccgtgatatcgacaagattgtcagctattacgccgacgatatcgtctcgttcgacgccgtaaccgcgttgcaattcaaaggcaaggcggcttaccgcgcgcactgggacgagtgcatgaagcactgccccggccccggcattttcgagtttcatgaactgcacatcgttgaagcgccggacagcgccttcgcccactggctggcccattgcggcggtgccgggccggatggcgtggtgaaggcgtgctggatgcgggtcaccgccggttaccagcgcatcgaaggccagtggaaagtggtgcatgagcactggtcggcacccttcgacatggaaagcggcaccgcgttgttcgggctggaaccctgaacgcgcgggactatagttgataagccgaaaagggagccccccatgaaatacctctgcctgatctacagcaacgaacaggtgctgcacacctcgcccgacagcccggcggacccggagtgctttgcctacgccgaggccattgcggccagcgggcgcatgctcgccgccgagccgctggagtcggtgagcaccgccaccaccgtgcgtatgcgcaacggcaagttgtcgatcaccgacgggccgtttgccgaaaccaaggagcagctcgccgggttttacctgatcgaggccaaggacttgaacgaagcgatccaggtggccggcggcattccggcggcccgggtcggcagtgtggaagtgcgccccgtgcgcgaactgaatctgtgaacccaataaccataagactcaagaggttgaccccatgaacctgcaagctgctgaatttgaactgtccatcagccgtgtgatcgacgccccgcgcgcccgcgtattccgtgcctggaccacccccgaactgttgcaacaatggtgggggccccacggcatgaccacccccgagtgcgaaatgaacctgtgggttggcggcctgtttcgcaccctgatgcgcgcgccggatggcgccgaatacccgacgtcgggagtgtttctggaaatcgatgcgccgacccggctggtatttaccgacgcctatgcgcccggctggattccgtccggcaagccgttcatgaccgccgaagtcaccttcgaagaagtcgacggcaaaaccctctacaccgcccgcgccctgcactggagcgctgaagacaaagccgcccacgaagccatgggcttccatgacggctggggccagagcctggaccgtctggtgacgttggtgaccgagcgcatgcgcgattgaaagcccgggtcgaggcgatttaccgcagcgaatcacggcgcgtactggcgacgctgattcgcttgctcggtgatttcgatttggccgaagaggcgttgcacgaggcgtttttcatcgcgatgcaacgttggccgcaagacggcgtgcccgacaacccacgggcctggctggtctcaaccggccgcttcaaagccatcgaccgcctgcgccgccaggcgcggtttaccccgttattgcaggagcaggccgacgcgctggaagcggctgattggagtgaagaagacgtggaagacgaccgcctgcgcctgatcttcacctgctgccacccggcgctggctgccgacgcgcaggcggcgctgaccctgcgtgagatctgtgacctcaccaccgaggaaatcgcccgcgcgtttctcgccacgccccccaccatcgcccagcgcatcgtgcgcgccaagggcaagatccgcgaggcgaaaatcccctatcaagtgccatcccgcgccgaattgcccgaacgcctcgacagcgtgttgcgggtgatttacctggtgttcaacgaggggtattcggcgtccatgggcgcggacattacccgcgaagcgttgaccggcgaagccattcgcctcggccgcttgcttatgcagttgctgccggaaccggaagtcatggggctgctggcgctgatgctgttgcacgaatcccgccgcgccgcgcgcacctcggcggacggtgagctggtgttgctggagaaacaggaccgcagcctgtgggacgccgcctcgattgttgaaggctgcaccctggtggaacaggcactgaccacaggccgctatggcccgtattgcctgcaagcggccattgcggcggtgcatgccgaggctgccagtgccgaggaaacagactggccgcagatcgtcgggctctacgatgtgctgctctggcaaatgccctcgccggtgatcgaactgaaccgcgctgtggcggtggcgatggggcagggcgcgttggcggggttgcagttggtggaggggattttgcagcgtggtgaattgcaggattaccacctggcgcattcggcgcgaggggaattttgccggcagttggggcgggttgacgaggctcgggatgcctatgaaaaagccctgtcactgaccgggcaagcgccagagcaacgctttttacagcggcgcctggccgaactcaaatcccccagacaatgaagatcacctgtgggagctggcttgcctgcgatagcggtgagtcagactgaaagtgtattagctgacccgccgccatcgcaggcaagccagctcccacaggaacagtgtttaactcaggggtgggttacggctgttgacgcgtcgccgccaacacaatctcgcgaatgcacacatgctgcggctgctggtaggcataggcaatcgccgacgccacatcatcggcactgagcaccgtgccgcccatgtcctgcttccaggcctgatacccggtcttgatcgcttcgtccgtggtgtggctgagcaattcagtctccaccgcacccggggcgatggtgatcacgcgcacattgctcggcgacaattcctcgcgcaggttttccgaaatcccgtgcaccgcgaatttggtgccgacataagcgacgtggttcgggaacgtcttgcgcccggccaccgagctgacgttgatgatggtgccgcctttgcgcgcgaccatgctgccggccaccgcatggatgccgttgagcaggcccttcacgttgacgtcgagcatctgctcccactgcgccgggtcttgctcgctgactgcgcccagcaacatcacgccggcattgttgatcagtgcgtcggccgggccgaattgggcctcggcttctttcacggcggcgaccagcgcggcacggtcagtgatgtcgacgccacggttcagggtgttcggcagggccagtttttcaaggcgatcgatgcgtcgcgccagcaacaacaacggatggcctgcggccgacaacaggcgggcggtggcttcgccaataccggaactggcgccggtgatgatgatcagtggcttgctcataaatgcattcctgggataagaaaaatcgataacgggatcgtggtcgcagtatattgaccctcgccaaggctgaaaaatgccttatttctctgtctgccatcggattcagctatggatgtgcgtcacctcaaggcctttctcgcggtgttcgaagaacgcaatattaccggggcggcccagcgtttgtttatcagccagccgaccctgtcggtgaccatcaagcagttggaagacgagctgggcgtggcactgttcgtgcgtcagccgcgcggcgtggaggtgagcgccgaagcgcgggtgctgtacccgcaagcgcggcgcatggtggccgaagcggaggcactgagccggctgtttcgcgggcgcgaaaatcgcatcgcgctggagctgggcgtggagggcgatattgccgacagccagattgaaaccttcctgcgcatggcgcaccaggggctgccgggtttgctgctgacgttgcaggaaggctgcgaagggcagggccgcctggccgtggaggaaatgtgctgcgaggacgagttgttcctgccgctttgggaagagtcctacgtgatggcgctaccccaggcgcaccccatggcgcaggcaggcaaagagcaggcgtgggcgccgattgaagactggatcacctgcccgcagcacgactcccatcaacgcctgatggcgctgtatggccgctcgccgcaagcggtggccgggcatgccgggtcgttgacccaggcgctgcacatggtggctgcgggcgtgggggtggcgatgttgccgcagtcgatggcggccgagcgtgccggggtggtgattcgcgagtggcatttgccggcaccgacacgtcgcgtgggcctgtgctttgccgcgcaagccctggaattgcccgcgctgcgcgccttgcacgaatacttccaaaacaaccgcccgccgcagcaatccgccgcctgaccccaatccactattcaacaccgtccaaatgtgggagctggcttgcctgcaaatgcggcggcattgccgagagggatgtcggctgacccaccgctttcgcagcctcgctaaagctcgacagctcccacaggtgatctgtgttgccgagtagatcagcgttcgccagtgaccaagccctcacagacaaccaccgatcaaaatgtgggagctggcttgcctgcgatagcgttccatcagtttgcgaagatgcaagctgaaccaccgccatcgcaggcaagccagctcccacatttttaatcagcagtgtctggaagtgatgagtccagcatcaaccccaacatccaactccccgctggccctggcgggtgctggcgcgaccagagcacatccaccgccaccgagcgtggccagctgcgcactgtcagttcaaccaggcccgcattgccaaaccgctccaccagccagcgcggcagcgccgcccagccgaaaccgagttgggccatctccatcagcatcaggaaactcggtgccgaccacacgcggccggtggggcgtatctcgttgggattgatgatgctcgccaaacgcagttcgcggtgttgctgcaaggtctgcggatcgacttcgtgcaggcccgccaatggatgcgtgggagcgacgaatagcgcgagttccgtgcgttccgccacaggcgcactgctcaggtcgggtgggtatacctcttgtgcctcgataaaggcgatctgtgcacggccgctttgcaccaggtcgatcaagtcttcgcactcggcaatcagccattccagctccaggtccgggtagcgttgttcaaagtccttgagggcaatttcgaagcgctccgactggtaggtgtcagacatggcgatactgactttcggctccagcccctgcgccaattggctcgccgccaacgccagtcggctgctggcttccagcacctgctcggcgcgttgcagcagcacatgcccggccggggtgagcgtgggtttgcggctgctgcggtcgaacagctccacatccaggtcaatctccaggctcgccaccgccgcgctgacggtggactggcttttgcccagtttgcgcgccgccgcagaaaacgagccctgggtcgccgcctgcacaaacgcctgcagcacttcgtttgaggccatgactatcgccttgatcgatggttattggttatgaagtatcgagtctaagggtgatcatggcaaccatcgttactcacggagcgcaggttatgcaccctaccaagtcgattactgaacgcgttggccaagccttggggtttgaaggcctggccttgttgatctgcacaccgctgctggtctggattaccggccgacccgctctggagatgggcgcggtgaccctgggcctcagcctgctggcgctgacctggaacatcattttcaacagtttgtttgatcgcctgaaagtgcgcatgcagttgtccggcggcgtgtggacccgcgtgttgcatgcgctgatgtttgaaggcgggctgattattgtcgcggtgccgttgatcgcggcatggatgaacatcagcctgatgcaggcgtttatcctcgacatcggcgtactgctgtttttcctgccgtatacctatgtgtaccactgggggtatgacgtgattcgggaaaaaatcgtacagccccgtgtgcctagccaagcttgagcgaggcgacaaaatccagaaacgcccgcaccttggcagcgggcaaatgccgcgacgggtagtaggcgtacaacggaaagcgctcgtcgggccagtccggaaacaattccaccaagccgccggccttcagtgccggcgtcaggcccaggtcgagcatctgcgccacggcgtgcccgtgttcacacacgctgtacaaggtgctggcgtcattgaccaccaaacggccattggtgcgcaccgtcaattgctcgccggggcggtggaactcccaggcaaacgggcggccggtttgcgagtcgcgaaagtccaggcacatgtgcccgctctccaggtcctgcggaaccgcaggcctgccgtagtgttcaaggtaggcgggggaggccacggtgagcacgcgcacgtccatcaatttgcgcgcgatcagcgaggaggattgcgggatgccgaagcgaatggccaggtcgaaaccatcggccaccaggtcgccgagttggtcgcgggtgtgcaggtccagctgcagttgcgggtactggcgcatcaagtcgccgagcaccggccccaataccaacctggaaaagtaggggtcgatattcacccgcaggcgcccgcgcacggtgagggcgctgtcggccgccgagttggcggcctcttcgaggccggccagcagcggggcgatttcctggtagaaacgccgcccctcgtcggtcaattgcaccgagcgtgtggtgcggtcgaacaggcggatccccaggcgtttttccaggcgtgaaatcgcccggctaacccccgagggcgtcatgtccaggctgtcggcggcgcgggcgaaactgccgcagtccaccaccgccgccaacacgcccatgccgccggccaaacctggatcaaaactcatcgatgattgcctgtcagggatctgaaggcattgatgctagcgcagaatgtttaaagaaacatgccgccggaggcttcgatgcgctgcccggtgatccagtggctgccgtcggccagcagcatcgagatggcgccgccgatatcgtccggcaaaccggcacggcccaatgccgtgttattggccaccatcgcattcacagccgggttgtcgcgcactgcgccgccgctgaaatcggtggcaatcgcgccgggggccaaggtgttgacgctaatcccgcgcgggcccagctccttggcctggtagcgcgacagcacctcaatggcacctttcatcgacgcatacgctgaatagcccggcaggctgaaccgcgccaggccgctggagatattgatgatgcgcccgccgtcactgatcagcggcagcagtttttgcgtgagaaaaaacggcgccttgaagtggatggccaccaattggtcgaactgttcttcactcgtttcggcaaagctggcgtggacgccaatgcctgcgttgttgatcagaaagtcgaagtgatcccgtgcgaaaacatccttgagtacgccagcgacttcgccgacgaaagcattgaagcggccgctctggctcacatccagttgcagcatggcgacgcgaccgcccaaggcttcaatctgtgtaaccacggcttctgcgtccgccgttgcgctgtggtaggtgccaatgatgtcgacgccttgcgccgccaggtgcagtgctgcgcttttacccaggccgcggctggcgccggtgatgagtgcaattttgcgggtcatggtgaagtcctctgattgatcgtgggactgagtgtatttattcgtctataacgtgataaacatggctataccggaatcactggccggataaggcgaacaatccatgaacaagcttgagctattacgcaccttcgtgcgggtcaccgaactgtcgagttttacccgggccggcgagagcctgggcctgccgcgctctaccgtgtccgagcacgtgcaggcgctggaagaactgctcggtgcgcgcctgttgcagcgcaccacgcgcaaggtgcaggcgactcaggacgggcgtgttttgtacgagcgcagcaaggatttgctctcgcacatggacgaactggaaggcctgtttcgccaggacgaggcgcaactcaccgggcgcattcgcgtggacatgcccaatgtgatggcgcgggaattgatcctgccgcgcctgcccgaattcatggacgcgcacccgctgatcgagctggagatcagcagcaccgaccgccaggtggacctgctggccgaaggctttgactgcgtattgcgcgtgggcgcgcaaccggaccagtcggtggtggcgcggtggctgtgcagcatgccgatgatcaactgcgtgagcgccggttacgttcaacgctacggcaagcccgagaccctggccgacctggcgcagcattatctggtgcattacgtgcggccgttgggctcacgttcgacaggctttgaatacgtgcaaggcaacaaggtgcaccgcgtgccgatggccgggcgaatcacggtcaacaacactgatgcttaccgttcggcctgcctgggcggcttcggcatcacgcaggtgccggccctgggtatacgcgacctgctcgccagcggtgagctggtggaggtattgcccggttacgttgcaccggcgttggacgtgtccttgctctttgcgggccagcgccatttaccacagcgggtgcgggtgtttatggactggctggccgccacaatggcagtgctcgttctttaacgccgtgccgacaactgttgcggcgcgaggaaggcatcgtggaagtaatcccgaaacgcctgcatcgccggggtaaacgcgcgctcgcggtgccaggccagccccacgctcatcggcgtgaccgggtcggtgacggtcagggtctcgatgcgcttgccttctagggaccagggccggtgcaccaggtccgacagaatcgccacaccgctgccattggcgaccatgctgcgcacggcttccaccgagctggtgcgcaggcgcacattgggcgtctgcccggcctgttcccagtaacgcatggcgctgtgttcggcctcatcgacggtgagcaggatgtagggttcctgcgccacatccgccaggctcacggcgccgcgttcacacaacggatgatggctgggcagccacaggcggcgttccgagttgaacagaatttcggagacgatatccgggtgggtgaggttggcggtgagcaccacggccatgtcgaactggccgttgagcaagccgtgttcgatggcttggcgttcttgctcgaacacctcgatggtcacgtccgggtgccagtgctccatgcgttgcagatggtggggcaggaaataaccgagcaccgtgtagctggcggccacccgcagcacgccgctggcgcggtagtcgggcagcgggctgttgagtgcgtcgtccacactgcgcacgatcacataggcgcggttgaggaagtgccgcccggcgtcggtcaggttcatgccctgggccgaccgcacgaacagctgcacgccgagcatggcctcgagttccttgatcgccgtggtcaccgccgactgggagatgttcaagtgaatcgccgcctgggaaatctggccgatttcagcggtggcgatgaagtagcgcacttggcgcaaggtcagggacatggctttatctgtttttcagaagatgggatatctgataatagatcttcccaaggggtcaagccgcggcctactttcagccatcactttttggcggagcagcttcgatgcaggcagtggatttcaattcagacatgggcgaaggcttcggcccctggaccatcggcgatggcgtggacgccgaactgatggcctatatcagctcggccaatatcgccaccggcttccacgccggcgaccccggcaccatgcgccgcacggtcgagcgcgccaaacaactgggcgtggccatcggcgcacacccgggctttcgggatttggtggggtttggccgtcggcacattaacgcgccggcgcaagaactggtggatgacatcctttaccagctcggcgccctgcgtgaaatcgcccgtgcccaaggcctgaccctgcaacacatcaaaccccacggcgcgctgtacatgcacctggcccgcgacgaagaagcggcgcggttgctggtgcacaacctgcacatcatcgagccgacgttgttgctgtactgcatgcccaattcagtgatctggcgcgtggccaaagaactggggcagccggtggtgcgcgagttttacgccgaccgtgagtacgatctcagcggctccatcgtgtttacccgcaatgtgcgggcgttggatccggccacagtggcggcgcgggtcctgcgcgcttgccagaccgggcgcgtgcgaaccgtggaaggcgaggaccttatgattgaattcgactccatctgcctgcacagcgacacccccggcgccctggaattggtggaggccacccgcgaagcgttggacaaagcgggcattgacgtcagaacaccccaataagatcgattcctcaatttttgcctgcctttctacaatgattccaagaggaacagacatggctcaaatgtcccccattcgctacagcttcggcggtgatgaacacctgtttgccgaggtcagcgacagcatgtccctggaggcctttttcaagggcatggccgtgacccgcgccgtggagcgcctggccctggaaggtgtgctggatgtgtgcctggccaatgcgtcgttccagattcgcttcgaccccgaccgtatcgcgccccatgtgctgctcgacgccgtacaaagcgccgaagcccgggccgtggccgaacgcacgctgcacacacgcatcatcgaaatcccggtgctctacaacgacccgtggacccatgaaaccttgatgcgttttcgtgaccgccatcaagaccctacaggtactgacctggagtacgccgcgcgcatcaacggcttggccgacgtggacgcgtttatcgctgcccacagtggcgcgccgtggtttgtgtcgatggtcggctttgtcgcaggcctgccgttcatgttccagatggtcgagcgcgaacggcaattgcaagtgcccaagtatctgcgcccgcgcaccgacacacccaaactcaccctcggtcatggcggctgtttcggctgcatctactcggtgcgcggcgccggcggttaccagatgttcggcgtgaccccggcgccgatctacgacccggcgcagcagttggcctacctcaaggaccacatggtgtttttccgccccggcgacatcgtgcagttcaaacccatgggccgggatgcctacgatgtggccgtcgcagaagtcgacgctggccggttcgatttgcgtatccgcccggtggagttctccctcgacgcctttctcgccgaccccatcggctacccgaaaaccctgcaggaggcgctggcatgatcaaggtgctcaaacccggcctcgcgacttcggtgcaagacctcggccgcgaaggctattaccacttgggcattccgccatcgggtgcgctggaccaatacgcactgagcgcagccaaccatctggtgggcaacccggtgggggcggcgggcctggaatgcacgctgatcgggcctgagctggagtttcaacaggacgcactggtggccctcagcggcgccttgatgtcgccgcgcctggacggtgaggtggtgcaccaggacacggcgtttcaggtacgggccgggcaggtgttgcgctttgaatttcccaaggctggcgcgcgggcttatctggcggtggccgggggcattgatgtgccgttggtgctcggcagccgctcgacctacaccctgggtgcgctcggcgggtttcaagggcggcgtttgcaggcaggcgatgaattgcccatcggcgaagccagtgggttggggcgggcgggcaacagtttgcccatggcgttgcgccgctcagtcggcggtgatgtgaccctgcgtgtggtgccggggctgtattacgaacgtttgacggacgccgccaaaagcagcttttttgccgagccctggacggtgggctccgaggcggaccgcatcggctatcggttcaagggcggcagcgcgttgagctttgagccacgggaacagccgtttggcgcaggctcggacccttcgaatatcgtcgacagttgctatccgattggctcgattcaggtgccggcggggttggagccgattgtgctgcaccgcgatgcggtctcgggcgggggctacgcaatgattggcacggtgatcagtgcggacctggatttgatcgggcagatgcagccgaaccagcgggcggggtttgtggcggtgacgctggaggaggcgttggaggcgcggcgggtctacaaaaaacggctcaaagcgatggccggactcttcacccactgaagcaatacaaaaccaaatgtgggagctggcttgcctgcgatggcagcggatcagtcaacatctgcgttgaatgttaatccgctatcgcaggcaagccagctcccacaattttgaacggcgttgggtcagaagagtttggtgaacagccagtacaggctgcccgacagcaggatggccgccggcaatgtcagcacccacgccatcaccaggttgcggatcgtgcgcatctgcagcccgccgccattggcgaccatggtcccggccacacccgaggacaacacatgggtcgtcgacaccggcaacccgtacatgtccgccgcgccgatggtcagcattgcgaccatttcagccgaggcgccctgggcgtaagtcaggtgggtcttgccgattttctcgcccaccgtcaccacgatgcgtttccagccgaccatggtgcccaggcccagggcgatggctacggcaatcttcacccacagcgggataaagcgtgtggagttgtcgatctggtccttgaacagtttcagcttgccttgggtatcggcatcgaagttgccgaccttgtccttgtccatcaggcgaatggtttcgctggccaggtacatgtcgttacgcacgttgcccaccgcttcggcgggcactttggccagggaaccgtagccttttacttcgtcaccgatatggccggcaagggcggccagggccggtaccagttccggggtgggttctttggtgcgcacatacgtcgagaggactgggcgcgggtcgcccggcaacacttgcggcgcgcttttcaccaaggcgacctgggtcacttcggcaacggcggcgaattgcagcgattgttcggcgggcatggtgcggttcagcgcgtaggccatcggcagggtgccgaccaggatcagcatgatcaggcccatgcctttctggccgtcattggagccgtgggcgaacgacacgccggtgcaggtggcgatcagcatgccgcgaatccaccacggcggcggggtgtcgcctttgggggccttgtacagcgagcggttcttcacaaaggcacgcagggccagcaacagcagcgcggcaaagacaaaaccgatcagcggcgacagcagcagcgcgtaaccgatcttgatcgcctggccccagtccacaccgctggtgccgtcacgcccgtgcatcaaggcattggccacgccgacgccgatgatcgagccgatcagggtgtgcgaagacgaagccggcaagcccagccaccaggtgccgaggttccacaggatggcggcgatcagcagcgcgaagatcatcgcgaaaccggccgaagaacccacctgcaaaatcagctcgaccggcagcaaggcgataatgccgaacgccactgcgccgctggacagcagcacgccgaggaagttgaagaaacccgaccacaccaccgcaaagtgcggcggcaacgagttggtgtagatcaccgtggcgacggcgttggcggtgtcgtggaaaccgttgacgaactcgaagcccaaggcgatcaacagcgctacgccgagcagcaggaacggcgtccaggtggtgactaccgtgcccagctcgtgcatgtcgtgcatcaggctgtaggcggtgaacagcaggcccatggcgagtacggcgaagaaaatgatcaccgtcagcaggccgggtttcttgtccagccggggtttggggtctgtgtgtgaggcggtggtggaggcagtcagggaaggggtggccatgccggagcatccagtgtggggaggatgccgttcatgatcattgcagaatgttacagagatgctgcggtatgtcagtgtttggggaattgaagttgccactggtccaataaacaccgcagaactaatgtcagagtgcaatcaatgtgggagctggcttgcctgcgatgcagatacctcggtgtttcagatgtaccgaggtgatgccatcgcaggcaagccagctcccacacaagccagctcccacagtttgattgcattccagcttagtagtctttgcgttttctgaaggcccagcggccggcaatcaaagtaaacgtcgccaccagcgccaccaggatccagaacccttccgggtcggtggaaagcggtacgccgcccacgttcatgccgaaaaagccggcgatgatgttgatcggcaacgccagcaccgtcaccacggtcagggtgaacagcgtgcggttgctttgctcgttgaggttggcggcgatttcttcctgcaacagcttgatgcgttcgcccagggccatcaggtcgttgatgatcagcgcaaactcctcggtggatttgcgcaactccttcacgtcttccttttgcagccactgcggcgggcggttgagcaggcgcagcagcgagccgggctccagcgccagcaggcgttgcaggcgcacgagtacgcggcgcgcggcgcccagctcggcgcggttggtggacaggcgcgaggacagcaactggtcttcgatgtggtcaacgctgatgctggtcttgcgcacgatctgggtcagcacttcgccctggtcgcgcagtaaatgcaccagcaattccagcggcgaacgaaagcgttcaccggccttcaccgacgagcgcaacttgtctaccgagtgcaagggttgcaggcgtgcactcaccagcaagcggctgcgggcgcacacccacagcgtggaaatatccgaggagaccatgctgctgaagttgaagaccacgtcgttgactaccgccagcaaggccgagtcgacgtgttcgatacgcgtggagcgtgagccttcgtgcagggcttcgaaaaactcatccggcaatgacaagtgcgcctgcatccagcgctcacacgcggcgtgggccaggttcaggtgcagccacaggaactcttccgggtcttgcggcgcctgcaaggcggccagcgcggtggctgagtcaatctgctcacctttttcgccggggcgaaaacggaaaccgtaaagcaagccaaacagatcgggatcctggtggctgtggtcaatgctgtggttcatggaggctcgcagagaaagcgcctgtaggacgtttcacaggttcgcgtgggcgaatcattgcaaggagatttgacagttttgtgacggttccggatttatttcgttgcgatgacactttattgaccgtctgtcagcaaccgttcaagaagcgtctggaacagccgattcaaggcaccaagaaccgtgttgaatcgcggtagttttgatgacagggaagtcgcggcgtgcatgcaccctttcccttgagtcgaggcttttccccgatgaatgttttgcgtacttccctcagagcacaaattctgtccctgctcggtggcagcctgttggcgatgttgttgatcgccctggcgtgtttcaacttcctctcgaacggcgtgcagagttaccgcagtttgatcgacgggcctttactcacctcacaactgatcgacgaagccaacctgcaattcaaggtgcaggtgcaggaatggaaaaacgtgctgctgcgcggcaaacaacctcaagacatggagaaatactggggccagttccaggaccgccagcgggatgtgcaggggattctcacgcagctggtgagccatacaagcgaagacccggcattgagccggcgcattgaaagcctgcgccaggagcatcaacaactgggcgtggcctatcagaaagggcgcgacgcctacatcgcggcaggcgctgagccgagtgccggtgacaatgccgtcaagggcgtggaccgcgccaccagcgagcagatgagcgcgttggtcagtgatttgcgtgagcaaggtgcgaagcagtctttggccatcagcgcctacgctgaacgcaccgtgatggcggggctggcaatcatgttgttgtcgggggtgttgatcggcctgttcagcctgtggctgatcaaccggaacctgatcctgccgattcgcggcttgatcgactacgtgactcaactgagccacggccgtttcgccgagcgcgttgccagccgccgccaggacgagttgggccatctggccgccgccgccaataccctgcgcgatttcctggccgaaaccttcagccgcttgcagcgcagcgccacggaccttgtcagcgccagcggcgagctgaactcgattgccgggcagatggcgaccggcacccatgatcaattcaaccgcaccgatcaggtggccacggcgatgactgaaatgtccgccaccgctcaggaagtggcgcgccacgcggccagcgcctcgcgtgctgcggatgaggcggatcaatcggcgcgtgaaggcggtgaagtgatgcgggtcaccatcgccaccatcggccagatgcgcgatgaaatcctcaacaccggcaccatcatccgccgcctggaaaccgacagcgtgcgtatcggcaaagtgctggaagtgattcgcgggattgccgagcaaaccaacctgctggcgcttaacgcggcgatcgaagcggcgcgcgcaggcgaggccgggcgagggtttgcggtggtggccgatgaagtgcgcagcctggcgcaacgcacggcggcgtcgatcatcgagatcaaccagatcatccacgcggtgcaaaccggcgcggtggacgcggccgaggcgattgtcagcggccagtcgtgcagcgatgacagcgtggcgaaggtgacccaggccggcgcgatgcttgctcacatcaccgaggcggtggaggcgatccgcgacatgaaccgccagattgcgacggccgcagaagagcagacctcggtggccgaggacatctcgcgcaatatcacgcagatcaccaccgtggccacggccaacatggacaacgtgcagcgcactgaagcggcgagcctgaacctgcgtgggttgtcgagcgagctgaatgaagtgacggcgcgtttgggcgcttgatcaggttgtcggcaacctgaacgtaaagaccgtgccgtgctgctcggtggtggacacactcagctcaccaccgtgggcatcggcaatctgcttgacgatatacaaccccaggccaaggccggcttgcggcgtgtctttgaccgggcgtgcgtagggctgaaacaggcggggcagggcctgctcgtcgatccggccggggtttttcaccgtcagcgtgaacaggtctcgatcgacgtgcgcggtgacctccaccgggccgtcgtggcggccgtggtgcatggcattcgccaccaggttggagagcaattgcgccagccggtcgcggtcgccgcgcacgccccgcaggtcgccgatatcggcataaatcaggcgttgcgggtggacgctttgcacctcggacaccacatgctgcaacgcatcctgcaagtccagacagtcgctgcggtgtaacggaatgccactgcccatgcggccccgggcgaaatccagcacgtcttccaccaactgtgcagcacgctggccgctggtgaggatgtgctgcaccaacgggtcggtcgcagggttgggatgtttgcgcagtaagcgttcggcgccgaagttgatggcgaacagcgggttgcgcaagtcatgtccgagtaccgcgataaactgctcgcgcagttcggcggtgctgcgttcttcctgcaaatcctcttcggttttctgctggctttcttccgcttcaatctgcaacgacagcacccgggcgaaggactccatggttgactggatcgtgctgctgcgcagttgtgcggggttagggtccagcgcgcagatcgtgccaaagaagcggccatcggtgcgaaacaccggcactgaaatgtagctttcgaactggtaaatgcgcggggtgtggtgatcgtggtacagcgggtcttcgctggctttgtcgatgacgattgagaggtgcgagccgcggatttcgtggcagagggtggtggtcaggtccagctcgccgcccacgccgaggccgaactccagctgatcgaggaccgcgcaggcggtccaggtgtcttcggttacgcgggccacggcggcaaagcgcaggccggtcatgtcactgatgaccttgagcatcgcgggtacggcgctgatgcggccaatggtggcgatgtcggcggctttttgccccatggcgtatctcgatctgtgaggtgctggcgaatagcctgggattttagcgaccttacaggctgtaggtgtaatttcattctccttaaaagtgtttttcccataactggctgacgagcgtgcataaaaaaaccgcgccactcggaaaagtcgcgcggttttattggcgtttggcttaggtatcttgtttgttttccagcacttcgccggttttggcgtcgagcttgaggtcccactttttgccggtggtatcggtcaggtctgcttcgtagaccaggcgaccggcttcgtgatccagctcggtgtcggtgatggttgcgcctgggtgtttggccagggccgcagcgttgagtttctcgaacgccatcacgtcgccggatttgagcagggcgggaatctggtccgggcggacatcggcctgggccaggccggcagtcagggtcagggcagtggcggcgaacagggcggtcagggttttcatattgtgtgtccttctgggtgagctgtttaagtgggctcaggttagccagcgcaacttaattcacgcttaattgattcaaagggttgcgccgtttgttcaatccgcccgacgcgcaggctccgatactggaggctcacgtaaagggaggttgcaatgaagcgattagtgggcggggtctacgggccggttttcctgacaggcttcgtcggctgggggctgtatcaaccgcaacgcttgttactggtgtttgcggcggcgctggcgatgtcatttttaatggagcagtggttaccctatgagccgcagtggaatcgcagcctgggggaccgtcggcgcgatacgctgcacgccctggtcaacgaaagcctgaatgccttgggccttttgatactgccggggctgacggcgttgctggcgttcgagggcttctggccgcgtggctgggcgctgtgggcacaactgctgctggcgatcgtgatcgctgatgcaggcatcactttgatgcactacgccagccatcgcattggcccgctctggcgtttgcacgcggtgcatcacagtgtgcagcggctgtacggtttcaacgggttgatgaagcaccctctgcaccagatgctggaagccacggcgggcctgttgccgttgttgtttatggggatacccctggaggtcgcgaagctgctggcgttggccattgcggttcagttgctgttgcagcattccaacgtcgatatgcgcctggggccactgcgatgggtgttcgcctgggcaccggtgcaccgctttcaccatatgaagtatggccgcgcgggggacgtgaatttcgggctgtttttcaacctgtgggattggctgctgggcacggcgttttatcgcgagggctaccgcatgggcccgggtgatttaggggtgggtagccgcccggatttcccgctggaatacgtggcgcagttgcgtgatccctttgtgcccgtgaaggccggcaaagagccgcagttgccagacgaactacgttaaaaaccgcacctgcatctgacgcagggacgctgccgcagtgacgccaaacaactgcttcatcgtccgcgagaaatgcgccgaatcggcaaaccccgcagcgtgggccgccgccgtcaaggtgtggccggcgagggcgagttgcaacgccacacgcaagcgccgccacacgacgaggcggcgtacgggcacacccagccgctgagtgaacaggcgctccagctggctcaatgaaaggtgcgcggcgtcggccagtgccagggctgaaaccttgccggcgagctgctgatcaagggccgacaaggcacgctccaggcgcgggtcgtcgagggttcgccgtggcaattgacgcaactgtgcgtccagcgtgtcgaggcagggttgagtattggccaacaggcattgcagggattgagcctcgaagatggccggctcggcgtacagcatcaacacgtcgccctcggactcgaggagggcgtggggctgtcgtgaagggataaacaggcgatgggtggtgacggtgcggccatcaaggttgaccgtgacgggcccggtggggcagagcatcagttgatgggcatagtgagcatggggcgcagtgcgccccggctcgccgaggatcaggctgtaatcgcgccccagccagaggcggcctgaccattcgggtttcactcagtagccattgtccttcagcaggtcctgaacgctcgaggacggccagcgcttatagaacttcagcagttcggcggcgcggttggtgaagatgccgtcgacgccggccttcatcactttctcgaagtccaccggctcgtccacggtgtagacgtgcaccagcaggcccttgtcgtgggtcagcttgttcatctcaggcttcaccaggtcggtgtagctctggtcgccatggttcgtcagctcggccgaagggcccgtgccgatggcgccgaggctcttggcttcgtcgacccatttttcgaactcggcggcgtctttgggctcttgcttggcgtagtaggcggccttggtcggttcaccggattcggcgaacgtttgggtggatttcggctcgatgctgccggcgcctacccacaacagcaggattttcggggtgttgggcatttctttttgcagctctttcaagctgtctttctcaaacgtctgcaatacaacgcggcctttaccctggccgacgccggtgttgctcttgcccagcttggagccggccgagctcaaccagcctttgtccagcagcttgtttttcaggtcggcttcgatgcccgggaactgcttgggctccttggtctcgatgtacaggccgggtttgtgctgcgggttgccttcggcgatcttgatgatttcgtccaggctctggattttcaggccgacgaacgccgggcgggcgcggtccgggtaagcggcgttgaaccagctgccggcgtccagggtgcgcaattcggcccaggtgaactcgttggccggggcgtccttgcgctcggggaatttggtggccacgtcggtggtgcgttgcaggttgttgtcgtgcagggcgaacaacacgccgtccttgctgcgctgcaggtccatttccaggtagtcggcgccgaggtcgcgggcgagcttataggacgcggcggtggattcgggggcgtcgtaggaggcgccacggtgggcgatgacggccgggtacggaatgccttcgtttgtcgccaattcagccgggctgatcgggtcggcggcctgtgcttgggagaggccgagcatcagtgcaaccagcagggcgctcttggtaaacgtgacaggcataagcgaagtcctttcgtggaggtaactttgagaaggcgtcctttttaacaattgattgcgaaaggcgctatcaccaaaccgacattaacgtgcgcacggcccatatttcttggtttttttgcggttcattgcagtactcttggccgaagctgccccgttagagggcagtaatttctgccacgcgtgtaaaccatctttccagtcccggtgggacttttcagtgaggtttaccatgcgcatcacttccgagcttatctgccaggcggctgacagactccagggtttcgtcggcctgaaccgcaagaccggccagtacatcgtgcgattcagcgaagattctttcggcatggacgtcgccgatgacggcatcattcctaccgctgagtttgtctggctgccggctgccgagcacagcatgaccttgtcgcgcgagcgtattcagttgctgctggaccagaatatcgacgatcgcctccacatcaccgagccgttgcgcgtgtacatgcgccgggtggagatcccgcagatcagtgcgctgcgcagtttggtgagctagagcggcgtttctcaagcccagtgaagatcaaaatgtgggagctggcttgcctgcgatggcggcgcaattgacacaccgccatcgcaggcaagccagctcccacaggttagaccgcgttaaagctgtaagcccgttccaccttgcacacgcgtgtctgaaacgcggcataccaggtggcgcggccctgctcgcgaacggcccggtgttctgcctgctgtttccaggccagaatcgccgcttcgctggcccaataggacacggtgatccccagcccatcctcccgcgccgattccaccccgagaaaccccggctgcgcctgcgccagttccagcatgcgtaacgcagcctggccgtagccttgatctccgtcggtgcgcaatgagctgaaaatcaccgcgtagtacggcggggcgggtgtgttggcgatcatcccgacacctcccggcacgccttgagcagcgcaactgccaagggcggggtgatgcctttgagggctgcgcgttccggctgaaagagggtggcgacgaaaaacggatgatccagtaactctatggcgcgcagatcacccgccgagtcatggccgctggggatcaggtcggtttcaagcagtgcggtggcgaactcggggttcataccgtagcgacaacgatacccttcgtgcacctccagagtgccgtaggcttcggcgatgcgggtgtagggcaccagccgcacgctgtcggtggcttccaccagtgcgcaactgagcggcgtgatcacggcgcgctgggcgtccggggccagttcgccgtgttcggcatccgcccagcccaacacgttgcgggcatattccagtaccgcatgctgaaagccgccgcaggtgccgaggaaaggtcggcgctgttcgcgggcaaattggatggcccgcagtgcaccgtcggtgtcacggtaggggctggcgggtacgcaccaaaaaccgtcaaagcggtgcaacggtggggtcgaggtgatcgtgtcagtgtcgagccattgcaggtggacgctcaatccgaggctgtcggcagcctgttgcagggccacgggaatggcttggtgagccgtcacgtcagggttgtagtcgccgatcagggcgaggtgcagggcggtgcttttcatcgtgtgcatcccatggcttgtggtgtcctggtgcgcactatagattggcgttcacgcaatcaatattggcgttttcccacatgcttaatgcagccacgcactatcaaatggattacgccgacctgtcactgattctcgccctcgtgcgcggtggcacgctggcgcgggcggcggcgttgttgcgcgtggatgtgtcgaccgtgttccgcgcggtgcggcggctggaggcggcgctgggccagacgctgtttgaaaaaagtcgcgccggctatctgcccaccggcttggccagcaacctggcgctgcaggccgaacgcgcggaacaagctcttgaagccgcgcgaattggcgtggagcagggcggtgaagtgatcagcggcacggtacgcctgacctgcaccgactcagtgttgcaaggcctgttgttgccggccctggcgcagttcatgccggcttacccggcgctgaccctggagctgagcacctcgaatgatttcgccaacctcagccgccgcgacgcggacatcgccctgcgcctgaccaagacaccccccgagcatcttgtagggcgttgcctcggcgttgtgacgtatcaggtgtgcgccagtgcagcgttcgcacgccagcacgcaggccgagcactggccgaactgccctggatcgcgccggatgattttctgcccgatcaccccacggtggtgtggcgccgcgaacacttgcccggcgtgcgccccagctatcgttgcaacagcatgttgtcggtgaccgagctggtgcgggctggattgggcgtggcggcgttgccggactttctattgggcgaaggcttgcagacgctgggccctgcgttgccggggcgggagaccgcgctgtggctgctgacacgccctgattgccgggcgctgcgctcggtggtggcgctgtttgatgaactgggccggcatgtgcgcatgaaaacctgagcattccactgttcaaggtgggagctggcttgcctgcgatagcggtgtgtcagccactggataattcactgacaggccgccatcgcaggcaagccagctcccacaagggactgccgtgtgttcagggttttcgcacgaactgatcatgcatttcgcacgtcagggtttcgatgcgctctgtcagttgcttggtcatttccgtcaggcgagtgttctgttccagcaattccaacagctgcctggtggtctgttctgcctgggcctggcgttcggtattggcaatggcgagggcttcgcggtgttgcgcatccgcgtcggactgcgctttatcgcgcgcggcctggcgcgtctgggccagcagaatcagcggggcggcataggccgattgcaggctgaacgccaggttgagcaggatgaacgggtacacgtcaaagtgcgtgacgccggtaatgttcagcaccacccacaacaccacgatggcggtttgcgcgccgaggaaggtcggcgtaccgaagaagcgcgcgaaggcttcagccttcagcgcgaacgtgtcgttgccaaacgtcggcgccaggtgggcatggcctcggtggaaacgcaggtggtcaacaggggcagcgtctggcttgtcggaggtcatggcgggctcgaatcctgagtgtgaagtcagtcagcactatagaccgagcccccgagccggacacatgaagatcgggtcagccgttgccgcgctcgttggcaaatgcgctgaccgcctgcacggcctcaccggtgccttcgcgaatttgcaggatcaccgtgccagcctggttggccagctcgacgccctgggcggcgcggtcgcgggtgccgtccatactgtcgatggcctgacgggtttcttcctggatcatcgcgatcatgctggaaatttccgccgtggagccactggtgcgtgccgccagttgccgcacttcatcggccaccaccgcaaagccccggccttgctcgcccgcgcgcgcagcttcgatggcggcgttgagggccagcaggttggtctggtcggcaatcccgcgaatggtgttgacgatggcggtgatctgctgcgagcgctcgccgagcttggcgatcagctgtgacgaaccgtcaatattggctgcgatttcgcgcatgccgctggcggtttgctggatcacctcagcgcctttttcggcgatgtcccgagtgttcagggagatgtgatacgcctgggcggcgctctgggcgtcggcggcatgctgctgcacgcgggccgtcacgtcggaggcgaatttgaccactttgcacagtcgcccgctggcgtcgtacaccgggttgtagttggcttcgagccacagtgtctggccatttttgtcgacgcgttcgaattggccgttgaacaattcaccctggttcagacgtttccaaaactcgctgtaggccgcactgttcgccagctccggcttgcagaacaggcggtgatgcttgccctggatctgcgccaggctgtaacccatgcgctgcaggaagttggcgttggccgtgatgatggtgccgtcgaggttgaattcgatcaccgccatggcgcggtcgatggcgccaagcttggcattggcttcactttcggcttgcaggcggggcgtgacgtccatggcgtatttcaccactttgatcacccggcctgcctcatcgcgcaccgggttgtagctggcttccagccataccgattggccgtcgccggccacgcgctcgaacgtaccggactggaactggccgttgcgcagttgcgtccacagctggttgtactcggcgctgcgggcgaaggcgggtgtgcagaacatccggtgaggctggccgacgagctgctcgctgcgatagcccatggttttgaggaagttgtcattggcacgcagcacattgccttgcaggtcgaattcgatcaccgccatggagcgctcgatggcgtccagcaggcttgcttgctgggcgttggtgtgttgcagggtgttgatggtttttttatgggcgttgaatagcatattcgtgagctcgggcaagcacgcgtctgggggtatccatgtataggcgcctgcccccgtagggcatttggccgtacggttgacgtgctcattgtcagcttcctggtgctgacagagggggggaacaacgggttcagagtcgcgcggcagacgagaagttcggccccttgagggacctttttaaaccggggcgaccaatggcggcattatgctattcccgcgtatttcagtcggagaattcagacgagatgtcgtaggacgactcaggcggaatgggccacgacgtaatcgctcacattaacccggttgcgtccggtgtctttggcggcataaagcgcacggtccgcggcgttgagccacatggcggcatcgctgaagaagggctggaagtccgcgaggccaatgctcaggctcacgcgcagctcggggatctgcgggttgcggtagttgctgaaggtttcgcgcatctgctccatgatcagcgcggcttcttccagcggcatttgcggaagaatcacacagaactcatcgccgccgtagcgtccggccaggtcgttttcccgcaggtgctgacgcagttccagggccaactggcgcagcactgcgtcgccgacaatgtggccgtaggtgtcgttgatctgtttgaagtggtcgatgtcgatcaacgcaatcgtcgcctggccgttttgctgttggcacttatggaacttgaggttgagcagatccttccacgagccatggttaagcaggcccgtcaggctgtcgatgcggctcagggcactgagcgcgcgtttgtgttccgaaagcttaatcgccaactgataacagaccatgccgatggccatggggtagagcgtcagcatcggcaggcagctatacacctgagtgaggctgacgttggggttgaacttaatcccgaacaacgcccacgccaccccgataccggcggcttgtgccaatagcccgcgcaggaacaggcgcttgccgccagccgcgacgttgttcatggtcatcatcgagaggatggtcacggcggtcaaaggtgtgaactgtgtggccgccgcccagaaaccgccgaacagcgagtcatagagcaggttgcgttgttcggccagataggggaattgcgagcgagcggagagctgataggccacatgcgcccacacatagccattgaacaacaggaacgcccagacccaggccggcatcgccagagggtagagggcgccgacgacactgatacaaccgatacccaggccgatgatccttggcttgtaaatgcgcctggcaaatgaaagccctttgcctcgtctgttttccatagtgttccgggtcagctcttttttgcagatacggcagcgtgcgtcagcgggtagaaccgttgatcggataataggtgtgaatattgtcagttattcgcgtgggaataatcagtgtccttccaggccatttgcgcagcactgcgtgcgaatacgcgaaaaacgacctggaatgtcgtacatgcaacaggtttttactgggggcggggcgtagtgacttcgtagccggcgaggaacaggtcgatggctgactcgataacgctggcctgagcggcagcgtcgaggggcggttggccgagggtgatctggggccagaacgcgaacgccttgagcaggctttgtatctgatgagcggcgaaggccggatcggtgcaggatagccgcccatcttcctgagccgcgcggacccactgggtgaaaccttcttcgcgtttgctgagccggttgaccatgtcttgcgcgcgttccggcgaatgaatggtggcggcaatggctacgcgggccaggtcgaggaagttggcgtccgacatcatctgcatcttcgccgccagcaacccgcgcagctggtcgcgcagaggccgctcgctggtgtagctcacatcaagctgggcaacgctgctggcccacagctggtggaggatttctgcaaacagctcttccttgctggggaagtggttgtacaccgtgcgcttggacaccccggcagtggcagcgattttgtccatgctggtgacctcgaacccgttagcccgaaactcggcgatggcagcggccacaatggcttcgcgtttacggtcggtgaggcgcagaggtgcagtcatgtttggctctagaaggaaattacactcggtagtttacttgctccgggttttgttgcaatctagaaactacactgtgcagtgtaatttatcagcgcagtgtaatttatgagcggaccccaggagtcactctgcaatggccaccatttcaacccgtctcgacccagcgcctgcggcactcaagcctgccgagcaggagcaagggcatttcagcaacgatgcgccggtgcaacacggcggctttggcaaaacgttgcgtattttctggaacatgctgttcaacaagccgcgcacgacacggccggtgggtaacatcccggtgcaacccttgacgcgtgagcaactgatggccgctcccgatcacagcgtgttccggctggggcattccaccgtattgctgaaaatgcgcggcaagttctggatcaccgacccggtattcgccgagcgtgcttcgccgttcagttgggccggccctaaacgtttccaccagccgcccatcagtcttgaagagctgcctgcgctggaagcggtgattctttcccacaaccattacgaccatcttgaccgtaacgccgtcatccaattggccgacaaaactcgctactttctcgcgcctctgggcgttggcgacaccttgatcaaatggggcgtggacgccagcaaggtgcgccagctggattggtggcaaggcaccgaagttgaaggcatccgctttgtctccacgccggcccagcacttttccgggcgtggcctgttcgatggcaaccagacgctgtggtgttcctgggtgatgatcgatgcggggcggcggatctttttcagcggtgataccgggtatttcgacggtttcaaacgtatcggcgagcaatacggcccatttgatctgacgctgatggaaacaggtgcttacaacgtcgattggccccacgtgcacatgcagcccgagcaaaccctgcaggcccacatcgacctcaaggggcgctggttgttgccgattcacaacggcaccttcgatctggctttccatgcctggcacgaaccgttcgaccgcatcatggcgctggcctgggagcgcaatgtgtcgatcaccacgccggccatgggccaggctttcagcctgaatcagcccgatcgcgggcatgcgtggtggctggaagtggaaactcaaggcgcgaaagaacaggtcgcgggctgagacaagaccattctgaaaaaaggagttttcagcgtatttcagccctgcgacaaacgtcggacgagggtgcgatgatcccgcgaattttatttcggggggtgagttccgatgcacagcgattgtaggaaatattggcatttgggcatgccttgccctgcaaggcattcgcagcccgtcacagaggacgcgccgccagcctcaagcgaggctcaaacctgcaataccggcccgcgcgctgctgtgttcagtgccgagagccgtgagagcgccgcgcctgttcccggctacaacgtgttggctccccacatcagaccggcgcgcgacccggcgttatcactgatcgctttaagtggtatagacccgacagactctgtaatggttgaggtcccgctggtgttgaataacacctctctcaccaacgcccagacgctttcggggtggcgtattggtttcgccgggcgctatgtacagggggaccaagtggcactcgttgagcatacggcggcgttttttcgagccctggaaaccctgcgccacgtcggcgctcaactggtgccggtggacgcacgacgcggggacatagcctttcaattcgagcttcaaacacacaatgaaatcgatgacctggtaagtacgcatgggcttgatgccttggtgtccgacggtcagagtgccgcatttcataacgcgtgcagaagcggttatccctcgttttgtgaagtgctggaggatggcacgaaactctggatatatggcgcgcggtggtcgcgtgatgcgttgccgacactgttggaggcttaccgaaaggcgcgaaccagcacacagctgggtgtgttgacccccttaagcagtgactgttagcgcgctttccgcgagccatctaaggcgatgctgcgcgcgtttcaaaggcaggcctgaacctctcacggtttacacttaagacggaggagctgccatgacgtacaaaattcacatactgggcgctgcgggtgcgggcaccacaaccttgggtaaagccttggctgagcgcctcaatgtcgcctatttcgactccgactatttcttctggcaacaaaacccggagcccttcaccgtccctcgacccaaagatgaacgcattcgcctgctgcaggaacaaagcgctggtcttcaaggctgggtgctgtccggttcattgtgtggctggggtgacgccatgatcgagcaattcacccatgtggtgttcctgcggctcgatccgaaagtacgcctgcaccgcctgcaactgcgggaagtggagcgctacggcgatcaggccctggaaggggggagccgccatgaaaacagcgttgcgttcctcgcctgggcagcgcgttacgacggcggcaaccacagcctgcgcagcttgcgccggcacgagagctggttgaaaccgttgagctgccctgtcattcggctggactctacgcaccattcggttgaggcgttggtgagtcaattgctgccgctgttgaacccatcagccgggaaatgatgctgtgtgcggcaggttcggctgcgcgggtgtcaaacctgcgcgcgctcatgccccaccccggcgcataccccgggaaaaacaccagcccttcagcctccaggcgaaacgccagaaccaggcgggtttcgtcttccacgtctgcattgctttcaaaacgctgaaccgcttccaccgccacaccggcctggcgggccaggtcttcgcggctccagcccagcattgcacgggcttgtacgctgtgtttggcggtgaattgatgcaggacgatctgctgttctacgaaagagctcattgccagggaggacatggggtttctccaggattcgacgagggaggcaaaactatactgtgtttttgtacagttgttttgaccgttcatcaactggatctttgccgacccgctattccacccccggggcctcccggatgatcaggtggtcgaggttttcgatattcgcgctgaatacgccaaaggtctgctcgggattcttcttgctcggcacttgcctgagttcaggcgttaccccgtagaagaagcaatataacggcttttcgctgttcaccgccgccttgatctgcttcaggaaagccgtgcgcttgcggtagttctcgatgagttttttgctcaggtagacattgaccgagtaaggcttcttgtcgagccacacttttttttcgaagtcgatgcgaaagctcgcagtgtagtccttgatttccttgatcttgccccagtagatcaggcccttgttgtcttgcaggtattcgatcctcttgaaaaacgccaggtaggtggccgtgtgatcaccgatcttcaacggcatgcgcttgagcttgtccttgtcatcgatattggacacgtagcattccactgggtgggcgaatacgctggttttatccggggtggtgtcgctggcgctgtgggaagatatgacgcgatttgaaggcgttttcgttggatcttgtggggcagaaccctcagtaacgaccacggtgtttttgcgttcgtactgacgccgtgtcagtacgaattcagacgggaaattttcctcgcgcccgtcgtcactttcgtcagctgcgttcttttgagtactggcatagcggcagccatcaatgtgccgggtaccggttttgttcttgaagtggggcgtacgcaggtaattgacgtttttcgcgttgaatgtgcttagcgtattaccggtatcgaacgctgcgcggcattcgtcgttggggcacaggaagctgtctttgtcggaatcgaagtcggcggtttcgtcgaaattcaggtctcgtacgtcgtagatcgacagcttttcgtcgagactcaggctgtaggccgtgtcgaatttcatggggctcgggtccgtgagatggatagccggatagtacgcaaatatgtgccagcaaggagagcaaaaagatgtgggagctggcttgcctgcgatcgctgtggggcagacagctgcaatgctgaatgtgccaaggctatcgcaggcaagccagctcccacattagaggtgcgacgcagggcttgcagctacccgccgccccgccagaaaacacaacgtcccgcccaccgccgtgagcccgctcaatgcaaagaacatcgccgtcggcgctgcattgatcaacagataaccacaaatcaccgggctcaatgccccgccaaaggccgccaggttctgtgcgccgtagtaactgccgcgcagcgattcgggggcgagggtgtcgatgaacaggaattcagacgggaagatgatcatctcgcccaaggtaaacacgaacatcgctaaacaccacgacagcaagccgtcagcctcgctgaaaccgaccagcccgcaaatgaacagcgcagtgcccagcagtatccagtaccgcaattgctcgcgcttgaggaaccggccgatctggtattgcagcaacatcacggtgattgcgttacacgccaggatcgcggaaaggattttcagcgcatcatccgggttgtgcaccaccagcagaaattgcgacaggtacaaggtgtagcggccatacacgatggtgctcaacaggctgccaccggtgaacagcaccaggctgcggtcgttgcgcagggttttcagggttgtcaggaaactcaagggtttggtgctttcatcacgccgtgtgggcgggataccgatcatcaggaacacgctggcaaacgcaatggcgctggacagcatgaacggcagcagcggcatctgcccggcaatcaccacgccgaccatggggccggtggcatagccgatgttggtgagggtatagcgcagggaaaacaccttggcgcgctggtccaccggcaggttctcgctgatgatcgccttggagccgatcaggaacagcgccgacgccgactcggtgatcacgagggtcagggtggtgaggtaaaggttggtggcaaaggtcagtaacagaaaaccgatggagctggagagcatggccaggatcagcagcttgcgtttctccatgcggtcgatgacgtagccgccatacaggcccatcagcgtggcagtaaacaccgcgatgcccatcaacaagccgatgtcctgctgattgaggcccaggcgtttactcagcaacagggtcatcagcgggctggtcatggcccggctgatcacgatggtcagcgagcagatcatcaggcggcggattaccagggaataggtggccacggtggggcgagcgtccttgttattttctcaatacaacacaaatcaggagtgaacacagatcaactgtgggagctggcttgcctgcgatagcggtggatcaggcaatgaatatgcaagctgacctgccgccatcgcaggcaagccagctcccacatttagatccggttattggccagagttgatggtgattttttctaccgcaccttgctccagatcccacttcttcaggatcttgccataggtgccgtcatcgatcatgccctgcaacgcctcgctgatcgccgtgaccagttcagtgttgctcttctcgatcccaagcccagtgaactgcttggcaatcgccaggccaaccggcttgtacttgcccttgtccagcgacatcaaataaggaatggtttcgctgccctgcatcgccgcatccaggcggttctgctgcaactgtgcccgcgcatccgccgaaccctcggtgccgatcaccacgatggctggcttaccggcggcttcgcagttttccttgctccacgcggcaatttccgacggccaggtggtacggcggctggtgccgacttttttaccgcacaggtcagtcaattccttgaggtcttcacgcttggccagggtgtagagctgcgggccgctggtgaaatagtcgatgaaggtcaccgccttttggcgctcggcggtgtcgctcatgcccgacaacacgatgtccacgcgcttggtggtcaggccgctgagcatctgctcgaagccggtttcctgccatttgatcttcacgcccaggcgctcggccaaggcgttgcccaggtcaaagtccaggccggtgagctggttggtggcggtgtccttgaaatccatcggcgggtagttcggcacgatggccgcgctgatctcacccttgtccttgattgccgccggcaatgccgcgaaaacagcggaggaggccatcaggcctgcgagcaacgttgggataaacaattttttcatgggggcgttctcgttagttttttagttaagtgcgaacggcagaaataaagctttgggtacgcgggttttgtgggcttattagaatttcttcggggctgccggcttccacaatctggccggcatccataaacaccatgcggttggacacttcgcgggcgaagcccaattcatgggtgaccacgatcatggtcatgccggtggtggccaaatcgcgcatcaccgacagcacttctcctaccagctccgggtcgagggctgacgtgggttcgtcaaacagcatcaacttggggcgcatcgccaaggcacgggcaatcgctacacgttgttgctggccaccggacaattccaccgggtaggcattgcgcttgtccgccaaaccaacgcgcgcgagcaactccagcgcatcttcggtggcttccttgggtgagcgcttgagcacctggcacgggccttcgatgatgttctgcagcacggtcatgtgcgggaacaaattgaaacgctggaacaccatgccggtggccaggcgctgacgggcgatctgcgattcgttcatctcgtgcagtttgttgccgacgacgcggtagcccaccagttcgccgtcgacccacaggccgcccttgtcgattttttccagctggttaacgcaacgcagcagcgtgcttttacccgaacccgacgggccgatgatgcacatcacttcgccttgctcgacctcgatattgatgtcacgcagcgcgtgatactggtcgtaatacttgttcaggttgacggccttgacgatgcttctcatggggcaaatctcctcaacccagacttacgaacgcttgccggcgccgcgggcaaagcgacgctcaaggcggctttggccaaatgaaagaacagtcaccaccgccaggtaccagatgccggccacaatcagcagctccatgacccgggcgttggcgtagtagatgttttgcgcgttgtgcagcagctccgagtactggataacactggccaggctggtcattttcaccatgctgatgaactcgttgcctacaggcggaatgatcacccgcatcgcctgcggcagaatcaccctacgcagcgcctgcaggctcggcatgccgatggacttggcggcttcgtactggccggtgtccaccgacagcaaacccgcgcgcaccacctcggcggtgtaggcgccctggttgatgctcaggcccaacagggcggccacaaacggcgtcatcaggtcgacggtatcgatgctgaacaggccaggaatcgcgatcaccgggaaaatcagcgccaggttgaaccacagcagcagttgcagaatcagcggtgtgccgcggaacagccaggtgtaggtgatggccacataacgcaggatcgggttggccgacatgcgcatgatcgccgtgatcaccccgatcaccacgcccaacgccatcgcgaggatcgacatgacgatggtgttgaccaagccccacagaatggcctcggacgtgaggaactggccgatgtaggaccattcgatctggccgttggcaaaggcacgcagtaacgcggccagcgcgatcacgatcaacgtggcaaaaaacatccgcccgtaataccgacgcggcacgtgctcgtactgcgtgatatcgaactggttctcggacaacttgcgctcggcttccaagcgctctgccggggtttggttcatggtgttactccactgctgtactcgatccaacggttaaaacacggtgcaaatgtgggagctggcttgcctgcgaaagcgccagcccgctcaccacaaatacccaggcttaaatccgaaacccctgataactctcagcccacttctgctgttcagccaaagcggttttcaaccgcccaatctgctcccgaacccgctccggcgccgtcccaccccaaccactgcgcgccgcaatcgccgcttccagggtcaagcaatcccgcacctcaggcaacagccgagcatccacctccgccaacatcgccggcgaggcttcccacaattcaatctcatgcttctcacaggcctgcaccaacgcgccggtaatctcatgtgcctccttaaacggcacaccacgcgttgccaaccaatccgccacctcagtcgccaaggtaaagcccatcggcgcctgacgccgcagctcttccacctgcaccttcatggtcgcaaccatcccggccatcgccggcagcaccagcagcagggtgtccacgctgtcgagcacgctgtgcttgtcttcactcaagtcccggttgtaggagagtggcaacgacttgagcgtcgacatcaacccggtcaggttgccgatcaaccgcccagccttgccccgcgccagttcggcaatgtccgggttctttttctgcggcatgatcgagctgccggtggcgtaggcatcgtccagcaccacccagcgaaactggcgcgacgaccacaggcaaaactcttcggacaggcgcgaaatattcaccccgagcatgcccgccacaaacagaaactccgccacatggtcacggctggccaccgcatcgatggagttttcacacggcccggtgtagcccatttccttggccgaatgctccggctgccgcgcaatcgccgaaccggccatggcggctgcacccaacggcgacaacgcggtgcgcgcatcccaatccaccaggcgctgtacatcacgcaacatcgactgggcgtgggccagcaagtggtgggcgaacacaatcggttgcgcctgctgcaaatgggtgaaaccagggcagatgctttcgacgtgttgctccgcctgctccaccagcgcctgttgcaaacccaacacctcggtggtgatggtgcgcgcatggtcgcgcaggaacagacgcaggtcattggcggtttgatcattacgcgaacgtccggcgcgcaacttgccgcccaaggcaccgaggcgctcggtcaatacgcgttcgatgaaggtgtgcacgtcctcgtcatctagggttggatgcaggcgcccggcggcgaagtcctcgccgatgcggtccagggcttccagcgtgcgcaacgtctccgactcatccagcaaaccggcgcgctgcaactcacgggcatgggcacgggagccagccaggtcgtagggcgtcaggcggaaatagcgctcagggcaacgcgacaacgcggccaaagcagcagacgggccggtcttgaaacgagcgccccaaaggcggtcggtgggctgggacatgggtgttcctcacgcttgtttttagaagagtcggaggcagtaaaaaactaaaaagacctgatcgcagtgtcaggtttctacgggtgttaaatcagcctctgtgtgctgttcaacccgctatattcaaggttgccaagggcggatgtttacggccattatcgccgcctggctatgttcaaggattgggttcaagcctgttgaatatggcactagaggtcaacgcgtattatggaaaccccactttccacttctggaaacgtaccgccaaaacccggcacacgaccgcccctgcaactgagcgggctggacttcaaattgctgcgcgtgtttatggccgtggtcgaagccggcggcttcagcgccgcgcaaaacgagcttaatgtgggcctggcggccatcagcaaacaaatctccgacctggaaatccgcatcggcatgcgcctgtgtacacggggccgggaagggtttgggctgaccgaagaaggcaagttggtgtatcaggcttccatcgagttattcacctcggtggacagttttcgcgacaagcttagttcagcgcaaaacgagcttattggtgaccttagtgtgggggttattgataacaccgtgtccgacgttaattcgccgcttattaccgcgttgggcaaattacatagcgagtcgccaaaaatcagattgcgcctgcatgcctcgcaactggacgaagttgagcgcggcgtagtggaagggcgcttgattgtcggcatcgtgccggtttatcaacgccgcgaagagttcgattatttcccgctgtacgaagaaaaggctcacgcctactgcgccgtaggacatccgctattcaacgcgagcgacatcacgccagaggtgctgcgccaatacgaagtggtgaaccatcgctatgcgatccaccgcgacaaggccaacttcgtcacctacgacagccagtccgcctcggcctcacaagtggaagctgtcgccattctgacccttaccggccgcttcctcggcttcctgccggaacactacgccgcaccgctggtaagagaagggcgcctgcgcgcactgtgcccggaacaggttcacctgagcaccgccttcaacctgatcctgcgccacaatgccccgagaagcccgatggtaaaagccttcgcaacggcgttgggtgtagacctcaaagctttggcataggccacctgccgaactcacatcaacgaactggcaaagatcaaatgtgggagttgtcgagctttagcgaggctacgaagggatcgcctcggtccacctgctgaaaccatacctctgcatcaacccctagcaccccatgctagtgcgctacccagcccgacgccgatcaaaaggtgggagctctcgagccccagcgaggcagcgatgggatcgcctcggtctacccgccaaccccacccacccgcatcaccgctgcaaccgagcccgcttcttcttcgcatgaaaatgccgaaaatgcgcatcctgcgccgccgccaacaactcccgatccccacgcgtatcgccccaagcccgcagccgatactcacctaaatccccatacaccgcctcaagccgcagcaccttgttctcacaccggcaattattccccgtgagcttgccggtcaacaccccgtccaccacctcaagctcagtcccgatcaacttgatccccagccgatccgcaaacggctgcaacaccaacgccggcgacgccgaacacagcgtcaccaccgcccccgacttcacctcatccgccaccgactgtaagcccgtcggccgcatcaaccgcggccacgtcttctggcaatacgcctgcgccttctgctgaacccacgccttctccacccccgtcataaaggtgcggatcaactgcgccttcaactcatcccggctgatctgccgcaccaaaaaacgcagcccaggcacagcgagtttgaccatccggccgtagaactcgccagggccaaaggcgaatttgaggaagggcacgaaactgtcgtggtgggtcagggtgccgtcgaagtcaaagacggagagtactttggcgtcagcggggccggcttcgagcatgtctgggttcacgggtgggcctcggtcctatcgggtgttttttgagcgtgcatcaggtgtgaccacagggaaaggctcctctctcaatcttttgattttcgagtaaagcccagcggtgaattcatcccgatcactcgaccggtggcaacgctgatggcaattggggcacaaggctacagcattgctggtgcgatccgaacccttctgggcgaggtgcttgacgtgatgtacttcaagaaatggctggccgttgtctaggttgaacggtgcatgtaggccgcaaccttcacaaatacccgccgcctgctggcgtacccaagcacgtacttccggatcgcgtacgtaggatgtgctggttgtgctgacctgttgcggcgtggtgatgccttcgggcttagtcttgatgggtttgctttgaagctttgccgcgcgccgttccaatagtgcttcatcagacgtgggggcgttgtcttgagattcaacgatgccgcgttgttcaagcattctacgaatacgagagacgattcccgagccgacattatttgcagctgtgtaacccgcaattggcgtctgattcagcgtttcaaatacagcagaaatattgcgcatccggtagtcgaccgacgccagggaccgagcgcctagagcgctttcgcgcagaagctcgtgttccgctttcttgttaagcggctggccgagactttccaatttcaacattttcaggtagccatcgacggacgcttcaagctcctgatcgctccagccggtattactttttttcgtgtccatacagccgccgagggtagaaaaccctcggacgatactgagtagccattattgcgtctatgaaatttcctacgttcctgcgggaattggctgtcgcttgctttagtgggttcgctgcttaattcgaaaacccagagtgagctttctccaccacgaagcccctgccgcttcacttcgataggttcgattcaccaataaatacggcgtatcccgaagccgaatccagccttcatcctgccaatgcagcaggtttaatgacatctgcggccaatccaacatgctcaataacggctgctctgctgtcttggctggtgctcgtcgcgcaatgtcggaataacttcatgagtgagccaatttcgtagctgtctgttctctggcgcgtagtgatagaccagcagcgcataggcaccggactcgctgatcatcaacatttcttctggttggccgtggtacagcaatcgcagggtttgtttctggtcctcatcgagcttacgagtcgtccgttcatccaagtagtagcccatcaaacgtccaaaatcgcgcgcgcagaaccatgcttggttttctataagaagggcgtggagttgaagagagtgacgcgtaaatacgatggcaatcgacggctcagtcgtggctgccttcttggcggtcggcaattcgagcaaatattgactaggcatttcctatgacctctacgtgattttcgggcgggctaaagcccaacgtagagacggattaagaaactccaactggcttggccccaaagacagcatgcgtaccgtctgacggaggtcagatggatgttcagctgtgtgattgaggtaaccctctgcgttgggcgtttcttaggcaccggcggatgaggttatttagctacgccgtttacatcaaccatctaatggacgatctgagtgtaagaaggctcccgtctggatcaacgggcataaaaaagccctgagcgagtcagggcttcttgatgttactcggcttaggcgttaatcccagctcagcgcgccgccagtctggtactcgatcacacgggtctcgaagaagttcttctctttcttcaaatccatgatctcgctcatccacgggaacgggttagtcgtccctggatactcttctttaagaccaatctgcgacaaacgacgattagcaataaacttgaggtaatcctccatcatcgccgcattcataccgagaacaccgcgaggcatggtatcccgcgcatattcaatctccagctgcgtcccctgcagaatcatctgggtcgcttcttccttcatctcggcatcccacaagtgcgggttttcgattttgatctggttgatcacgtcgataccgaagttcaggtgcatcgactcatcccgcaggatgtactggaactgttcggccacgccggtcattttgttgcggcgacccatggacagaatctgggtgaagccgcaatagaagaagatgccttccagaacacagtagtaggcgaccaggttgcgcagcagctctttatcagtctcaaccgtgccggtttcgaacttcggatcggagattgaacgggtgtacttcagaccccaggcggcttttttagcgaccgatggaatctcgtggtacatgttgaagatctcgccttcatccatggccagcgattcgatgcagtactggtaggcgtgggtgtggatcgcctcttcgaaggcctggcgcaggatgtactggcggcactccgggttggtgatcaggcggtatacggccagtaccaggttgttggcgaccagggagtcggcggtggagaagaagcctaggttgcgcatgacgatgcgacgttcgtcgtcggtcaggccttcggggtttttccacagggcgatgtcggcggtcatgttgacctcttgcggcatccagtggttggcgcagccgtcgaggtatttctgccaggcccagtcgtacttgaagggcacgagttggttgaggtcggcgcggcagttgatcatgcgcttttcgtcgacggcgacgcgggcggaggcgccttccagttcggcgaggccttcggcgacgtcgaggctgtcgagggcggccttggcgcgcacgatggcggcggagtcactggcggtgacggcgcgggcttcgatggcggcggcggcgccggctccgtcgaggcggtccatgttggcttcggtggcgtggccggcgttggcgcctttggcggtggctacttcgccgtcttcttctttgtcgaattcgtcccagctcagcatgacgtgtcgtctcctgcgtgagggctcaaaggtgcccgtgtgaaaccggatggttgggtgttcacacggccctgaggccgcggtggatcttaaggaatcgtttgttgcagctagcgcacgcattaaacggaatagggttacgggtgctctgcgtgaggcttgaggtgcgcagcggtcggtgcaagcttgcgcgggaggcctcaggtctggctcttcatcccgatgtaaagggatattgcaggcccgatttacccgcgcattatagggaaaaaatcgggtttgtgttgcggcggatggtctcggatcacagacaaaaagcctgctatttgagccagagtgagggtttacaggggtttggtggggtgacgggcggtggaggtattttgttgcggctggggcagggtggctgttgctgaatgcggtggtgtggcggctgttgctatcgcaggcaagccagctcccacattgggattgaggcgtggcggggatgggttcttggccgcaagaacgatttcttgcggcggccaagatccgggtttaaagcaaactgacgaagttattatccgttagagcaaccgttgcccatgacttggtatttaagaatatgccgctgaccttgtgagtcttcatattccatttgtaccggtacaacttcgcatacttctggaacagtgcttatggacaatactttggcaacatccaggtgggtgctgtagctgtattcctcaaccaatggcgcgttgttgccggccagttcggtcggggcctcgtcggccagggcggcggtggcgcacaggctgctgagggccataacgactaaagctttcatttctctatttaccttcttctgggcgaaaggggtcacggggcccttgtgaggccgcgtgtgtaacttgagagttgggaagttcggattaacgttgccttcgtgggggctgttacgttgttaatcacggtgccttgttggcggagttgattttaggcgtgcgggttatattcatatacccgtgcttttgataaacactattggcggtttttgtaacaatcctgtggtaaagcttttttcatctgcgcgcaaagccccacaggctgcgggccagagccttaaaagcgcatggcatggcattttgtaggggcttgttactaccatcgtcgaatggttctatgggggcgccccggctacaacagggcatacaaaaacaactattgtcaccgaggtaagaaagatgagtgcggcttccctgtaccccgttcgccccgaagtagcagccaacacgctcaccgacgaggcgacctacaaggccatgtaccagcagtcggtggtcaaccccgatggcttctggcgtgaacaagccaagcgccttgactgggtcaagcctttcaccgcggtgaagcagacctctttcgacgaccaccatgtcgacatcaaatggtttgccgatggcaccctgaacgtttcctataactgcctggaccgccacctcgctgagcgtggcgatcaggccgccatcatctgggaaggcgatgacccttccgagagccgcaccatcacctaccgcgaactgcatgaagaagtctgtaagttcgccaacgccctgcgcggccaggatgtgcaccgcggcgacgtggtgactatctatatgccgatgatccccgaggccgtggtcgccatgctggcctgtacccgcatcggtgcgattcactccgtggtgtttggcggtttctctccggaagccctggccggccgcatcatcgactgtaagtcgaaggtggtgatcaccgccgatgaaggcatccgcgccggtaagaagattccgctgaaggccaacgtcgacgacgcgctgaccaacccggaaaccagcagcatccagaaagtcatcgtgtgcaagcgcaccaatggcaacatcaagtggaaccagcatcgcgacatctggtacgaagacctgatgaaagtggcgggcaccgtgtgtgcgccgaaagagatgggcgccgaagaagcgctgttcatcctgtacacctccggctccaccggcaagcccaagggcgtgcagcacaccaccggcggctacctgctctacgcggccctgacccatgagcgcgtgttcgactaccgcccgggcgaaatctactggtgcaccgccgacgtcggctgggtcaccggccacacttatattgtctatggcccgctggccaacggtgcgaccaccttgctgttcgaaggtgtgccgaactacccggatatcacccgggtcggcaaaatcgtcgacaagcacaaggtcaacatcctctacaccgcgccgactgcgatccgcgccatgatggcgtccggcactgccgcgtgcgaaggcgtggacggcagcagcctgcgcctgctcggctcggtgggtgagccgatcaacccggaagcctgggactggtactacaagaacgtcggccaatcccgttgcccgatcgtcgacacctggtggcagaccgaaaccggcgccaccctgatgagcccgctaccgggtgcccacgccctcaagccaggttcggctgcgcgcccgttcttcggtgtggtgccggcgctggtggacaacctgggcaacatcatcgaaggcgccgccgaaggcaacctggtgatcctcgattcgtggccgggccaggcgcgtaccctgtacggcgaccatgatcgtttcgtcgatacctatttcaagaccttccgtggcatgtacttcacgggcgacggcgcgcgccgtgatgaagacggttactggtggatcaccgggcgtgtggacgacgtgttgaacgtgtccggccaccgcatgggcaccgccgagattgaaagtgccatggtcgcccacccgaaagtcgccgaggcggcggtcgtcggcgtgccccatgacatcaaggggcagggcatttatgtgtatgtcacgctgaaaaatggcgaagagccgaacgaagcgttgcgcctggagctgaaaaactgggtgcgcaaggagatcgggccgattgcttcgccggatgtgatccagtgggcgccgggtttgccgaagacgcgctcggggaaaatcatgcggcggattctgcgcaagattgccacggctgagtatgacgggttgggggatatctccaccttggctgacccgggtgtggtggcgcatttgattgagacgcacaagaccatgaacgtcgcttaaagacgcgtacagagccccattcggtgaaagccgggtggggcttttttgtgaggttttgaaacctgtggagatcaactgtgggagctggcttgcctgcgatgagggtgtgtcaggcacaggtgggctaactgatcgattgctatcgcaggcaagccagctcccaccggtggaatgcatttcacagtgactgtcggtggtggcttacaggaccgcttaaccaccaaaccaataaatatcggtttttcacgcagggcatttccgaatgttaccgccaccgccaaatgtgtaacccgccgcccaatcctgaggcaatgcgctacgccaacgccccgaaaagccccattccagacaccccaagaaataagattaaacgccagacttgccgtgctagaagggtttgcgaataataggcccgctatttgcagcatcaacaggtttaatatcttttgtctctgcataaaaatcagaggctgtcaatgtgctggatccgctttctcagtgcttctgtaaattgttgtcgcattgaggaaatatcggcttccggcctgtcgttagaatgccgatcactcgctcgtcgtctcaggtgttgaacctgtgtaggacgcagcaccgctattcggtttcatttaagtcgcaccgtgggccacggctcatgctgcttattgccctataccgatggagtcccaagatgaagaaactcgtgctgttgggcgccctggcgctgtccgtgctgtccatgcaggctttcgctgatgacaagcccctgaagattggtatcgaagcggcttaccctccgtttgcctcgaaggcgccggatgggagcatcgtgggttttgactacgacatcggcaacgccttgtgcgcagagatgaaggtcaagtgcgtgtgggtcgagcaagagttcgacggcctgatcccggcgctgaaagtgcgcaagatcgacgcgatcctgtcgtccatgtccatcaccgaagaccgcaagaagtccgtggacttcaccacccgctactacctgaccccggcacgcctggtgatgaaggaaggcaccacggtcagcgacagcctggatgaattgaaaggcaagaaaatcggtgtgcagcgcggttcgatccatgaccgtttcgccaaggaagtgctggcccctaaaggcgccaccgtcgtgccttacagctcgcagaacgaaatctacctggacgtggaagccggtcgcctcgacggcaccgtggctgacgccaccctgctgcaagacggcttcctgaagacgccagccggtaaaggctacgcgttcgtgggcccacagttcaccgacgtcaaatacttcggcgacggcgtcggcatcgcggtacgcaaaggcgacaaggccgagctggacaagatcaacgcggccatcgcggcgatccgtgccaacggcgaatacaagaaaatccaggacaagtacttcgacttcgatatttacggcgctgaccctaagtaactcgtcgcagctgtctgtccccaatggcgcaagcaacagaattcctgaggtttgcgccattttttcatcccccttttcgaggacctgaatcatgttgaaaggctacggggccgtcatcctcgatggcgcatggttgacgcttcagctcgccttgtcgtccatggccttggccattgttctgggtctgatcggggtcgcgttacgcctgtcgccggtgcgctggctggcctggctgggtgacttgtattccacggtgatccgcgggatcccggacctggtgctgatcctgctgattttctacggcggtcaggacctgctcaaccgcgtcgcgccgatgctcggctacgacgactatatcgacttgaaccccttggccgccggtatcggcaccctgggtttcatctttggcgcctacctctcggaaaccttccgtggcgccttcatggccattcccaagggccaggccgaagccggcatggcgtatggcatgagccccttccaggtgtttttccgggtgatggtgccgcagatgattcggctggcgatccccgggtttaccaacaactggctggtattgaccaaggctaccgcgctgatttcggtggtgggcctgcaagacatgatgttcaaggccaagcaggcggcagacgccacccgcgagccttttaccttcttcctcgcagtggcggcgatgtacctggtgatcaccagcgtttcgctcctggccctgcgctatcttgagaagcgctactcggtaggcgtaagggcggctgatctatgatcttcgactacaacgtcatttgggaggccatgccgctgtacctcggcggcttgctgaccaccctgaaactgctcgccatctcgctgttcttcggcttgctcgctgccttgcccctgggtttgatgcgcgtatccaagcagccggtcgtcaacggcgcagcgtggctgttcacctatgtcattcgcggcacgccgatgctggtgcagctgtttttgatctactacggcttggcccagttcgacgccgtgcgcgaaagcttcctgtggccgttgctgtccagcgccacgttctgcgcgtgcctggcctttgcgatcaacaccagcgcctacaccgccgagatcatcgccggcagcctcaaggccacgcccaatggcgagatcgaagcggccaaggccatgggcatgtcgcgctacaagctgtatcgccgcatcttgctgccgtcggccctgcgccgcgcgctgccgcagtacagcaacgaagtgatcatgatgttgcagaccacgagccttgcgtccatcgtgaccctgatcgacatcaccggtgccgcgcgcacggtgaatgcccagttttacctgccgtttgaagcctatatcaccgccggcgcgttctacctgtgcctgaccttcattctggtgcgcttgttcaagttggccgaaggccgctggctgagctacctggccccacggaagcattgatatggaacgcatcgatcacctgttgccctggggtcacctgggctgcgagcgccaactgagcgtgtttcgtttcggcagcggcgagcgcaaggcgtatatccaggccagcttgcacgccgacgaactgccgggaatgcgcgcggcctgggagctgaaaaagcgcctgaccgagctggaagcgcaaggcgccctcaatggcgtgatcgaactggtgccggtggccaacccgatgggcctgggccagttgctgcaaggcagccaccaggggcgtttcgaagtgggcagcggcaagaatttcaaccgtgacttcgttgagttgagcgagccggttgccaagcggctcgacggcaaactgggcgatgacccgcacgccaacgtgcgcatgattcgccaggcgatgaccgatgctctcaacgcattgcctgcgccgagcagccaattgcagggcatgcaacgtgtgttgctgagccacgcctgcaccgccgatgtggtcctcgacctgcattgcgactgcgaagccgcgctgcacatgtacgcgctgccccaacactggccgcagtggcgctcgctggccgcgcatttgaatgtgaaggtcggcctgctggcggaagactccggcggcagttcgttcgatgaagcctgttctacgccctggttacgcttggccaaatcctttccggcggcgcagattccgctggcatgcctggcgacgacgatggaactgggtggccaatccgataccgggcgtgacgaggccattttccatgccgagggcatcctggcgtttcttgccgagcaaggcctgatcaagggggagtggccagcgccgcagtatgagccttgtgaaggtatgccgtttgaaggcaccgaaatgttgttcgccccccatgctggcgtcatcagttttctgcgcacaccgggcgaatgggtagaagcgggcgatgagatttttgaagtgatagaccccttgtccgaccaggtcagcgtcgtctgcgccggtacggccggagtgctgtttgccgtggaacggctgcgttatgcccaagcaggtttttggctggccaaggtcgcggggcgtgaagcgctgcgccatggcaatttgctgaatgactgacccactgtttttgtgagaaccgaccgcatgtacaaacttgaagtccaagacctgcataaacgctatggcagtcatgaagtgctcaaaggtgtgtccctggccgccgcggccggtgatgtgatcagcatcatcggttccagtggttcgggcaaaagtacctttttgcgctgcatcaacctgctggagcaaccccacgccggcaagattctgctcaacaacgaagagctgaaactggtggccaacaaggacggcgccatgaaggcggccgacccgaaacagctgcagcgcatgcgctcgcgcctgtcgatggtgttccagcacttcaacctgtggtcgcatatgactgcgcttgaaaacgtgatggaagcgccgatgcacgtgttgggcatgtcgaaaaaagacgcgcgtgaaaaggccgagcactacctggcgaaagtcggcgtgggccatcgaaaggatgcgttccccggccacatgtccggcggcgagcagcagcgcgtggcgattgcccgtgccctggcgatggagcccgaggtgatgctgttcgacgaaccgacgtcggcactcgacccggaactggtgggcgaagtgctcaaggtgatgcaggacctggcccaggaaggccgcaccatggtggtggtgacccacgaaatgggctttgcccgtgaagtgtcgaaccaactggtgttcttgcacaaaggcattgttgaagaacgcggcaacccgcgtgaagtgctggtgaacccgcagtcggagcgtttgcagcagttcctgtccggtagcttgaaataatcaagactgcttttgtgcactgaagtagtgcatgctttacagctctaaagctggcttcggtacctgtgggagctggcttgcctgcgatggcggtgtatcagtaaaagatgtgccaactgacccgccgccatcgcaggcaagccagctcccacattggatctccacaggttttgagatttgtgttcgtttaccggctagcattggcctttgtcttcattaccgttactcgcttcggatagcactccatgaccgcccataaaattggtttcctgatttggcccagcacaaaagccctgacgcttgcgctggctgaggaggccttgcgcgttgctcagcgggtgcatccggacgtggtctatgagctgtcgttcctgctcgcggagcctgctaccgacggcgcctggcaactgccgggtgagccgtgggccggtaagctggaaggcttccagaagctgttcctgctggcggacgaaccgccgaccgttatcgcctcgcaactgagcaccgcgctcaaacagctggtacgcgccggctgtgtgattggcggtttgtctgccggtgtttatccgctggcccagttgggtttgctggatggctaccgcgccgctgtgcattggcgctggcaggatgatttcgccgagcgtttccccaaggtgatcgccaccagccatctgttcgactgggaccgcgaccgcctgaccgcctgtggcggcatgtcggtactcgatttgctgttggcggtactggcccgtgatcacggcgccgagctggccggtgcggtgtccgaagaactggtggtggagcgcatccgcgaaggcggtgaacgccagcgcattccgttgcaaaaccgcctgggttccagccatccaaagctgacccaggccgttctgctgatggaagccaacatcgaagaaccgctgaccaccgacgaaatcgcccaacacgtgtgtgtgtcgcgacgacaactcgaacgcatcttcaagcaatacctcaaccgcgtcccgagccagtactacctggagttgcgcctgaacaaggcgcgccagatgctcatgcaaaccagcaagtcgatcatccagatcggcctgtcgtgcggcttctcctcggggccgcacttctccagcgcctaccgcaatttcttcggcgccaccccgcgtgaagaccgcaaccagcggcgcagcagcagcccgttcgaactgtcgtcggtgccgtccgagcgcggctgatccggtttattcctcctgaggctgggcttggggaggcggcagtggattgccgtcttcgtcctgagtggcttcgatcacttgaaactcgttacccgtgcgctggtagtagcgcctgagatagcccaggctctcgggcgacagcgggttgccgctcaggtcgcagtcttcgtgaaacacggggatcatttccaacaagtcctgtgggatttgcgtaatcaggttgtcgctcaggtccagggtttgcagttcgctcagttggaatactccattggggaccgtgctgatctgtgtggcgcgcaaatgcagcgccaccagctggttcatgccgctgacgtcggggggcagggtcagcgggttgtcgctcaagtcgagaaactccagggtgttcaggtctgccaacgagcgtgtgctgttcgttgtcagggtgatcgcgcactggttcaactccaggctggacagttttggcaagtcgaatagcgcaccgggcagggttcccagctggcaacgacgcacatttaatgtctgcaggttaggaaagcaccgtagcgtgccatccaccgatgtcgtcgtgccgttgccggtgaattcgaaccgcgagatatgttcaatgcgcgcactgagtgatggcaactctcccatgatgggcgtgtcgaggctcaggctgtgggtgagttcatcgtcgaggctttcatcgtcttccgcgctttcacggcgccatgcctgttcgagcagcgttttgaaatcacgtcggtgcaattgttcccgggcttgcgcgtcttcatccagtggcacgtccaggacagggtggcgcgccggtacatccagggcccactgctgcaggtcggtggtcaactgtgcgtactccgcctcaagccttgccaggtggggcgccacagcatccatgtcacctggcagcgtgaagataaagtggtcagcttcgctttccagcagaagcgggtagagcgcctcgaccctttcacgttcggccaccgggctttgggcgttgaaaaattcgccggtgcgttggcagtaggctttgatctgctccaggctgacgcgagacagtgggttggcgaagaggttgaagcgatgggtggctgtgataggcagctggaagctggcatcgggcagttcggcgatggcgttgtggctcaagttgatggtcatcggcctgttctgggtcatcaagccaggggggacttcctgaaggccggtgctttgcagtgaaacatctttcaggtggatcaggcgctgaaagtcgaggggtgagcccaaagggttgttggagaggtccaggtgttccaggcgcgtcatgcctgcaagtgcagtgcggctggcctcggacaaagtgattgcgcagcgcggcaggcccaggtgggtgagcttgggtaggtcgaacgccgaggcaggaatatcccccagttgcgcgttctggatactgagaatatccaaggctgcaaagcttttgagaaaggcctcaggcttcaatggcgcgccgttgcattcgaggttcaggtaaccaatgtgtttgaactgtgcgctcagtgtcggcagatcgccgatcaaggctgtgggcacgctcagcgcatggataaatcgcgtgtcttgtggggtttcccggcgccagctgctttccagcaggcggtgcaatgcttgccgccgggcgtgttccagcggaggtaattctgcttcgccggaccacgctgccaattctgtgcgcaaggtttccagctcccccgccagttgtgcaagctcacgcctgccggcttcggtatcgcccggcaagctgaagatgaatctattgatgtcgtcgttattcaatgaggggaacaacaagcgtgcatcccgtttgtcggcttcggcggcgtcggcttcccagtagctgccgtggcgctggaaatacgcctttatctgctccagcgtgggttgcgaaaacgggttgtcggaaaggtcgaagcgttggctttgcgagggtgacatttcgaacaatgctggcggcaactcgcggagctggttgtcgctcaaaaacaccgtgtccaggtgctgcaggttcagcaggccggtgggcatccggtcaatgccggtctgggacaggtcgaggacttccaggtcgcgcatcgcttgaacatcaggcacccggcccaaggggttctggtgcaggttcagcgcctccaggccgctcatcgcggccaggcgcgcggcgctgtcggcggtgagggtgatatggcagttgtccaggttcagggaacgcaggttgacgaaggtatcgatcaaaggcggaaactcgccgagggggatatcccggatttccagatgccgcaggcgtgggaaaccctcgacaaagcgcgcagcgcccagggtgccttcggcgccgagcactgacaggagcgaaacatggatcaactcgttattgagtaccggcagttcgcccaggatcggccactccaggcgcagcgtgtgaccgtcgcgcgtgatgtcttggtaatggttgtcgaactctgtttcccggcgccagcagcggcgcagttgctcggcaatatggccgcgattctgttgctcgtagcggcgtcgctgggcggtaagtgatgttccggtggcggggtgttgagttggaatagcgcgttgccagttcgagagtgacgtgtccagctgtcggtactcggtttccagctcggtgattgctccgtcagcgccctgggtgtggccctgcaagtgatcgatcaagtgctgcacttgctcgtctggcaggatgggaaagagtgcgcgtacgcgttgttgcagcgtcagcggttgggccggggctgctggttcgccgacgtagccttcggtgttgccgagcaggcgcagggtttcgaggcgcaggggttgcggctggggcgcgccgagttgcacgcgcaacgcttcgcgtgccagcggttgccgggccagacgccttttaagttcaagcccgttatggatatcaatattcaatgcatcgcgttgtgcatcgggcagagcgtgcagaatcgcgctgtacaagtcggtctccccggacaacgcgttgctgccctcatacggcacataaacgcctgagtcgaggcgaaccagtgtgcggcggatcggtgcgtcggtcgggccaatggtgttccactgtgaaccggcgaggctgcgatgccgcgcttcaaggtggatttgctccgaccagccgggctgcaggcgcagggaattaagcgccagacggtcggtgtccacgtttggctccgagtccagatgcaagccttcgtaggcgcggttgaggcgcacctcgtccagggctgcgcgggccaggtctgccaggcgtgggggtgtgcgtcgttggtccatcgcttccagttccgcgccgctcgcctggctcactagccgatcggccacgctgacaggcaggccggctgtagtgtgcaggatttgctgcgtgtaaggcgttgaagtcggggggcgagtgccgtaacgggaattgaacaaggctgcgcgttggcgttcagctacctgtgccaggttattgcgcaggagtcgggttcgggcctccaggctcagctgcggatcgccgatacgctcgtcgaactggatgcgcagttcgtccgggttcaggcactggaggacggttttgagcaggtcgccgctgtccagttgggcttcatgaatttgcactgtgggcgcgtttgggttgccaaaggtccaggtgacctggccttgcgcattcagaaaccgcagcgatttaccgtttggccaattaccgtaggtggtcagcaattgcagtgagtcctgagggtcgatgctgttgtagaccgccgggtcgtcgctgcgcaggctggcgatcaactgcgtaaggtcgcggtcgatacgcaggcgggccagggtgtcttcgaacaatggcggcaggggcaagctattgacatgcatcttgcgcagggcgttttcctccataccactgatggcaagggcctgttcgcggtcctccaggctcagaccctgcgccgtgtgccccaggcgctgtagctgggtggcgcggtcccattgcagcggacgttccagttcggtgtgccagatacccgcgccgttatgacggactgtgggctgataggcatccgggcgggtggggtgtttgaggcggtagtgcgcgctgttttcaatgggctccacggcgtaaagcgcgtcgcccagaggcaggatcgattcgccgcgaacagtgtgcaagccgtgctcgttgatgcccaggcggggcggcaacgtgagcctgcgctgatagggggccaggtcgggtttccagtaacggcggttgccgttggccagggtcaccggtttgaaacgctcaatgaaggccaccacctgggccggtaatactttgcgcatttcggtgatgccgatcgtgctgcctgccccgaatgcgcccagttccaccagtgcctggagcacccccatcaggtgggtgaaggcttcgccagtatcgccttcggcccagtcgacgatcccctcgaatacctcgtcgagcagttgataggccatgtagcccagcatcaactcacccagccctggaataaacggcgcgacgatcaatagcgcggcgttcaggatggatgacgcgacattgacgaacgagtcccacagcgcccagcgcgcgttgcggtcgacgtcggccgtcgacaccgcttgggttcgcgcatcgttgagcatctggttaagcgtttgctgatagcagtgctgccacggttctcccgcaatcacgctcgcgacaaattgcagtttgggatcgtcggtcggctgattgcgccacggcgccaggccgctgccacgcacgggcggatgccaagtgatgcggcccaggcgctggctgagattggcgaaaaacagcccacggtgtgtgtgggcgacaaaacggctgaaaaaagcctgatagtcggcgttgcgcaactgctgcgtcagcgcctgcttgaaggccagaggcgaggcgtattccttgagtgggtgctgcggatcattcggtacgtaggccagcaggcgttgtactgagcgggtgctttccaggtcgggcgcgagcaacagaatgccgttcagcggcacgtccatcattgtgaaactgtgacagcgcagaggcaggttgccgagtttgaggtcctgtcggccttgcagtagcgcgtctacctgttgcgcgtaatcgtccctgatatcgccccgtgtgcgtgccacctgtaaggctgcacgcagagctgccttctggctggtggtcaccttgtgctcaagcaccgcagcgctgaccggttcggtgagccccagctgttcgcgtaaataggtttgatagcgtgcgccgatgtccaggtcgcggcacagctgtgtgaagcgggccacggcgattttctcgcggatcgcgggcagtgtgtcgaattggccgctgtcggagggccgagtgatgaaggtagaggccggttcaaaggcgcccgcgagggtttcgtcgtgctcgaagttattcaaggcggcgtccagcatcgacacggtccaggtgcgcgtggcgccagtggggatcgaaaatcctggcgtcttcagaggtatgtagaggcgcaggaaaacgctttcgctgttgaggtccaggccgaagcgggtcttcaaggcttcttcaagcacctcacgggcatacgccttgggaccttttacgtgtttgagcgcgtcatccacggcattttgcgcgcgccaatggtcggcattcaggcgcttgagcgccgcatctgcgggcgtttgctgcggtttggcgcgggccagggcgtgctgtttggcactggaagcctctgcgatccagttcgggaaggcgtgcctcaggaggtgataatgactgtcgggttggctggaggtcgagggcgtactcatgcgcaaatctctgataggcaagaaagcacatcagtagatcagcgcgtttcgcaccgctggctctagatagttagtttaaactgcgccattgcgatgctatttgtcgcattggcgtaaacccgccaaaatcgcgggttggcgctataagaagttgtcgcttggcggcaaggccgcactgaaaactgtccttacaatccctgcatcgcccgccagttccaggcaggcgttcctcttcaggagactccgatgtccgttgagcaagccccggtgcaacgtgccgatttcgaccaggtcatggtgcctaactacgcgccggccgcattcattcctgtgcgtggcgaaggttcgcgcgtgtgggaccaggcgggtcgcgagctgatcgactttgccggcggcatcgcggtcaacgtactgggccacgcccacccggcgctggtcggtgcattgaccgaacaggccaacaagctgtggcatgtctccaacgtcttcaccaatgagccggccctgcgcctggcgcacaagctgatcgacgccacttttgccgagcgcgtgttcttctgcaactccggcgccgaggccaacgaggccgcgttcaagctggcccgtcgcgtcgcgttcgaccgtttcggcaccgaaaaatacgagatcatcgccgcgctgaacagcttccacggccgtaccctgttcaccgttaacgtcggtggccagtccaagtactccgatggtttcgggcctaaaatcactggcatcacccatgtgccttacaacgatctggacgcgctgaaagcggccgtttcggacaagacctgcgctgtggtgctggagccgatccagggcgaaggcggcgtgttgccggccgagctggcttacctgcaaggcgcccgcgaactgtgcgacgcgaacaacgcattgctggtgttcgacgaagtgcagaccggtatgggccgcagcggccacctgttcgcgtatcaacattacggcgtggtgccggacatcctcaccagcgccaagagcctgggcggtggtttcccgattgcggccatgctcacccgtgaggacctggccaagcacctggtggtcggcacccacggcaccacttacggcggcaacccgctggcgtgcgcggtggccgaggcggtgattgacgtgatcaacacccctgaagtgctggccggtgtgaatgccaagcacgacctgttcaaggcgcgcctggaacagatcggcaagcaatacggcatcttcaccgaagtgcgcggcatgggcctgttgattggttgcgtattgagcgacgcgttcaaaggcaaagccaaggacgtgttcaacgcggccgagaaagaaaacctgatgattctgcaagccggcccggatgtggtgcgtttcgcaccgagcctggtggtggaagaggcggacatccaggaaggtctggaccgttttgagcgggctgtaaaagcccttacacacatctgactgaccgggcctgtgggagcaggcttttgtggcgagggagcttgctcccgctggagtgcgaagcgctcccaagattttggggccgctgcgcagcccagcgggagcaagctccctcgccacagcaagcccgctcccacattggatttatgcgaatccaaattccgtgcccggcatttttccctctatgagtttttcgagttaaggagtgacaccatgctggtgatgcgccccgcgcaaatggctgatctgggcgaggtacagcgtctggctgcggacagcccgattggtgtcacctccttgccggacgacgtggaacgcctgagcgacaagatcgccgccagcgaagcgtccttcgcggcggaggtcagtttcaacggtgaagaaagctatttcttcgtgctcgaagacaccgagaccggcaagctcgccggctgctcggccatcgtcgcctcggccggttactcggagccgttctacagcttccgtaacgagaccttcgtgcacgcctcgcgcgagctgaagatccacaacaagatccacgtgctttcccagtgccacgacctcaccggcaacagcctgctcaccagtttctacgtgcagcctgcgctggtcggttcgccgtggtcggaactcaattcccgtggccgcctgttgttcgtcgccagccaccccgagcgctttgccgactcggtggtgaccgagatcgtcggctacagcgacgagaacggtgactcgccgttctgggacgccatcggccgcaatttcttcgacctcaactacgccgccgccgagcgcctgtgcgggctgaaaagccgcaccttcctcgccgagctgatgccgcattacccgatctacgtgccgctgctgcccgacgaagcccaggaagccatgggccaggtgcacccacgtgcgcagatcaccttcgacatcctgatgcgcgaaggcttcgagaccgatcactacatcgacatcttcgacggtgggccaacgctgcacgcacgggtctcgggcattcgctccatcgcccagagccgcgtggtgcccgtgaagatcggcgagatggtcaagggcgccggccgccagtacctggtgagcaacgggcagttgcaggattaccgcgcggtgatgctggagctggactacgcgcccggcaagccggtgaccctggacctggcagccgccgaagccctgggtgttggcgaaggtgcgagtgtgcgcttggtcgcggtttaaagaattgagtgtcgcgggtggctgccaaacagcggcccgtctgaggagatagcatgatcgttcgtcccgtacgcagcagcgatttaccggccctgattgatctggcgcgcagcaccggtaccggcctcaccaccttgccggccaatgaagagcgcctgacccaccgtgtgggttgggccgagaaaacctttcgcggcgatgccggccgcggtgatgccgactacctgttcgtgctggaaaacgacgaaggccgcgtagtgggcatttccgccattgccggcgccgtgggcctgcgtgagccctggtataacttccgggtcggcctgacggtcagtgcctcccaggagctgaatatctaccgcgagattccgacgctgtttctggccaacgacctcaccggcaattccgagctgtgctcgttgttcctgcacgccgattaccgcaccggcctcaacggccgcatgttggccaaggcgcgcatgctgttcatcgccgaattcccgcagctgtttggcaacaagatcatcgccgaaatgcgcggtgtgtccaacgaagcggggcgttcgccgttctgggaaagcctgggtcggcacttcttcaaaatggaattcagccaggctgactacctcaccggcgtgggcaacaaggcgtttatcgccgagctgatgccgaagtttccgctgtacagctgcttcctgtccgaagatgcgcgcaacgtgatcggcaaggttcacccggacaccgagccggcgctgagcatgctcaagagcgaagggttcagctatcagggctatgtcgacatcttcgacgccggcccggccgtcgagtgtgaaaccaccaagatccgtgcggtgcgcgacagccagtcgctggtgctggccatcggcacgccgggggacgacgccacgccgttcctgatccacaaccgcaagcgcgaagagtgccgcattaccgccgcaccggcccgtctggcggcaggcacgctggtggtcgacccacagaccgccaaacgtctgcaactggtggtgggtgatcaagtgcgtgctgttccgttgtccgctgcccgggagtcgaaataatgaattcgctgtatatcgcaggtagctggctggctggccagggtgaactgtttgagtcgcgtaacccggtgacccagcaggtgctgtgggccggtaatggcgcgagcgccgaacaagtggagtccgccgtgcaggctgcgcgccaagcgtttcccgcctgggccaagcgttcgctggaagagcgcatcggcgtgctcgaaaccttcgctgccacgctgaaaagccgcgccgatgaaatcgcccgctgcatcggtgaggaaaccggcaagccgttgtgggaatcggcaactgaagtcaccagcatggccaacaagattgccatctcggtacagagctaccgcgagcgcaccggcgagaagagcggcccgttgggcgacgccaccgccgtattgcgccacaaaccccacggtgtggtggcggtgttcggcccttacaacttcccgggccacttgccgaacgggcatatcgttccggcactgctggcgggcaacaccgtgttgttcaaaccgagcgagctgacccctaaagtcgccgagctgacggtgcaatgctgggtcgaagccggtttgccggcgggcgtgctgaacctgctgcaaggcgcgcgggaaaccggtattgccctggcggccaacccgggtatcgacgggttgttcttcaccggctccagccgcaccggcaatcacctgcaccagcaattctccgggcgcccggacaagatcctcgcgctggaaatgggcggcaacaacccgctggtggtggacgaagtcgccgatgtggacgcggcggtctatacgatcattcaatcggcgtttatctccgccggccagcgctgtacctgtgcccgtcgcctgctggtgccggaaggcgcgtggggtgatgcgttgctggcgcgtctggtggcggtcagtgcgacgattgaagtcggtgcgttcgatcagcaacccgcgccgttcatgggttcggtgatttccctgggcgcagccaaggccttgatggacgctcaggaactgatgttggccaatggcgccgtggccctgctggaaatgacccagccacaggaccaggcggcgttgctgaccccgggcatcattgacgtgaccggcgtgaccgagcgcgaagatgaagaactgtttggcccgctgttgcaggtgatccgctacgctgacttcgaagcggcgattgccgaggccaataacacccaatacggtctggccgctggcttgctgtcggactccgaggcgcgttaccagcagttctggctggaaagccgcgccgggatcgtcaactggaacaaacagctgactggcgccgccagcactgcgccgtttggtggggtaggggcgtcgggcaaccaccgcgccagtgcgtattacgcggcggattattgtgcgtacccggtggcgtctctggagaccccaagcctggtggtcccggcaacgctgacccccggtgtaacactcaagtgaagatggcaccgatctaatgtgggagctggtttgcctgcgatagcatcacctcggtctgactggaagaccgagtcgcctgcatcgcaggcaagccagctcccacagtgaacgggtttacagctatagatctgcagttaatgcctataaaaacagatgttcgtggagcctcgccgatgaaatcctgtgaagtcaattttgacggtctagtggggccgacccataactacggcggtttgtcctacggcaacgtcgcgtcccagagcaacagccagcagtcttcgaacccgaaggaagcggcgttgcagggcctgcaaaaaatgaaagccctgatggacatgggttttgtacaaggtgtgctggcgccccaggaacgccctgatgtggcggccttgcgcaacctgggtttcagcggcaccgacgctcacgtgatccagcaggccgccaagcaggccatgccattgctggttgcgagctgttcggcgtcgagcatgtgggtggccaacgccgccaccgtcagcccgagcgccgacacagccgatgggcgcgtgcatttcaccgccgccaacctcaactgcaaatatcaccgcagcatcgaacacccgaccaccagccgcgtgctgggtgcgatgtttgctgatcagcagcatttcgcccaccacgccgccttgccggccgtggcgcagttcggcgacgaaggcgcagccaaccacacgcgtttctgccgtgagtacggtgaagcgggcgtggagttcttcgtgttcggccgcagcgcgttcgacacccgttacccggcgccgcaaaagtacccggcgcgccagacccttgaggcgtcccaggccgtcgcacggctgcatggcttgaaagatgacggcgtggtctacggtcagcagaacccggcggtgatcgatgccggcgtgttccacaacgatgtgatcgcggtgggcaacggcgaagtgctgttctatcacgaggacgcgttcctcaataccgagcacatgctcgccgagctgcatggcaaactgggcaagctgggtggtaacttccagtctgtctgcgtgccacgcgcccaggtcagcgtcgaagacgccgtgcgctcctacttgttcaatagccagttgctgagccgccccgacggttcgatgctgctgatcgtgccggaagaatgccgcgccaacgagcgtgtctggcagtacctgcaaagcctgaccacctccggtgggctgatccgtgaggtgaaggtgttcgacctcaagcaaagcatgcagaacggcggtggcccggcgtgcctgcgcttgcgcgtagcgctgaatgaaacggagctggcggcggtgaacccaggcgttatcatgaccgcgccgttgtacgaaacgctgacccagtgggtaggcaagcactaccgcgacagcctgcgtgaaagcgacctggctgacccgcaattgctgcttgagtgccggacggcactggatgaactgacgcaaatccttaaactgggctcggtttatcctttccagatcaattaacgccatacggctgagaactattgttatgaccaccgacaccctgaaactgattcttgaagacaccgacggcacccagctggaaacctcctgcacccgcgtcgccgtggtctggcagggcaaggaaatctggatccagcacgacggccgcggccaattgctgatcggtgtggatgtggaagaaggcgacgccgaatacgccaacctgctgatgcgcccattggccaccaacttgatgagcctgcaactggaaatggaaccggccgacgttgacggtgatgacgacgatcacgtccacggcccaggctgcaaccactaaggaagctgcttatgctcgccctcggcaaactgcttgaactgaccctcgccggtcgcgaaccggcgcaaaaaattcaactgactgtcgacggcgtgcagatgcgctggctcagcgagggcgcactcgaagtgcgcccgccgcaggcccgcgacaacggcagcgacctgttgctgtcgtccggcatccatggcaacgaaacggcgccgatcgaactgctcgaccgcctgttgcatggtatcgcccgtggggagatcaaaccccgcacccgtattctgttcctgttcggcaaccccgaggccatgcgccgcggcgagcgttatctcgaactggacgtcaaccggctgttcaacggccgtcatgaaaaaaacattggccccgaagccatgcgcgccgccgagcttgagcaactggcccgcagtttcttcagcctgcctggccgttcgcgcctgcattacgacttgcacacggccattcgcggctcgaagatcgagcaatttgccctgtacccatggaaggacgggcgccagcattctcgccacgaactggcccgcttgcgcgccgccggcatggaagcggtgctgctgcagaacaagacctcgatcaccttcaccgcgtttacctacgagcaactcgacgccgaggcgttcaccctggaattgggcaaggcgcggccattcgggcagaaccagggtgtggacgtgtcccgcctggaaacccgcctgaagcagatcatcgaaggtaccgagcctgagacggacagccttgacggcttgcaactgtttgccgtgtcgcgcgaagtcatcaagcacagtgatgcgttcctgctgcacctgccggcggacgtggaaaacttctcgccgctggccagggggtatttgctggccgaagacgttgccaagactcgctgggtgatcgaggaggagggcgcacgcattatcttccccaacccgaaagtgaaaaatggtctgcgcgccgggatcctcatcgtgccgaccaccgagcacggcctggcttaatgattcaggtactgtttgcgcggcggtaacccgagctccttacgcagcccgttttcgctgaattcctgcgggttggtgttggtgggtggggtgctcgggtcgcggtcgaagtcgaacggtggtgctgccgttggcaggcctacggcttgcaattcggggttgttcaccgggtaacgtggtttgttgccgtcaatgccatcggggctctcgccacgcaagagcgtgccgctgacgtgattccaggcgtggcacagctcatggaacaggttaatgatgctgggcgttccgggaattatgtcggtggtgttgtaccagattttcccgccgtaagaggcgcggccaggctggtcgttatcgataaacggccaattctcggtgcccggtgccggcacaaactgaccgttgagctttgggtagaactcgtgaattgtgatgggttgcccgctgtcgatggctgcgcgttccagttgtgtcagcaaccgttgaccggtgggtgagctgagcagcaggttcaaatcgtcgttgacccgtttgacgaattgcacgctgccttgcaccacgaggccggtctggctgagggcgttgggttcgaggtgaaccgcatgggaggccaactgcccgggaggcagatcagggacgtccgggtgcatcatcaaggcgcaattgacggtgaggctgcttttgaaattgtagtaggtgacgtcgtcggccttgagctgcgtgacatcgttaagcccatcgccggtgtaaatgacgttatgggcggggcccgccttgatccggtcatttccggggccgccgctgaggatgttcggcccgcgcccaccgacgatatggtcatcgtcctcaccaccgtcgataaaacacgagccgccaccgccactgagatcgtctttgccggggccgccatagacggtcatgtgggtgtcctggaagccgtgcacctcatcgtcgccttcgcccgcttccacgtggcaattgccgctgacgacggcgatgaagtcagcgccgggcccggtatataaactggctgttttagcgctgctgaccacgcggtcgtcgcctgtgccgctgtaaacaaagacgggcactatcacgttgtcttcgatatgaatccggtcgttgccgccctgggtgtccagcaccagtgtttgtgtgcgccagttgagggtgatttcgtagcgagactggttgatctgcaccgtcagcgtcagttgagtgtcgattgggggagcggcaaagatattgacggtgtcaggtgtatcgaatgtgatgaggcacagttgatcgacctcctcatccctgaacaatttgcgctcgatgcgcacgttttcattttcaagaatgttgtggatttcggtaaaacccgggccaccggggcgttcgttagtgggctcgcgcctggggttgggggtgagcgtgtgtgcatcgatgacgtagacgccttctgcattttggtgtgggggcatggcgcagttccttgtgtttagggtaagggaggcaggccttactaaacctcgggaatgcgttcttgaagcggtagatatgcaggtgtcaaaaaaatgccccggcaagtggcttgccggggcatttttttatcacgggctgagggaagttcagaccgccagtttctgatcgctgcgacggattgcgcgaaccttgtgcagggtgtcggcgcaggtgcgtgcggcttcctggcccttgtgcacgaagtgctcgtagaagaatgtggtgtgctcgctgcctgcatggaagtggtgtggggtcagggacaccgagaacaccggcacttcagtttcgagctgcacctgcatcaggccgctgaccaccgattgggccacgaactcatgacggtagatgccaccgtccaccaccagcgcggcagcgacgataccggcgtaacggccagtcttggccagcagcttggcgtgcaggggcatttcaaaggcgccgccgacttcgaagaaatcgatgtccgattcctggtagccctgggcgatcatttcggcgaggaagcctttgcgcgattggtcgacaatatccttgtgccagcaggcctggataaacgcgacgcgctcgccgtgatggtttttgcttttgctgtcgattgcggtgggttgcatgttctgactcctgtttaagaaaaaaacagggcgttatgaatcgaatgggatttcaagggtacggacggcgacgtcatgtaaacatgaacgcggcgctcggcccttgggtgccaatcccgttctctcttcatccggactatgaccgtcggccccgggatcacaccgggtctgctgaccttgccgccgtcctgcttgagcagttcgaggcgccaagcgctcgcgggctatgcacattgcgtgcaattaccgccggtggggaattgcaccccgccctgagaacgttgccgccagaaccctggcggcggagagtttttaacacggtttttccaaaactgcacgaccgccgtatcgataagctatatcggtttgtttggttggtattcgattgaaggtgcaagggggcttgatattccgtggctttgcccgcagtaatcactcacaaaaggaacttacttaaccctctagaggcttgtttcatgtctgtgatcgacctgcgcagcgacaccgtgacccaacccacccccggcatgctcgacgcgatggccagcgccgtcagcggcgatgacgtgtatggcgaagaccccagcgtcaaccacctggaggccgagctcgccaagcgcctggggttcgcggcggcgttgttcgtgcccaccggcaccatgagcaacctgctggcgttgatggcccactgtgagcgcggcgaggaatacatcgtcggccagcaggctcacacctacaaatacgaagggggcggggcggcggtgctgggttcgatccagccacagccgctggaagtgcaagcggacggctcgctggatctggaccaggtgctggcagccatcaaacctgacgatttccatttcgcccgcacccgcctgctggcgctggaaaacaccatgcaaggcaaagtgctgccgctggaatacctggccaaagcgcgggcgtttacccgtgaacatggcttggccctgcatctggacggggcgcgcatctacaacgcggcggtcaagctgggggtggatgtgcgcgagatcgcccggcatttcgactcggtgtcggtgtgcttgtccaagggcctcggcgcaccgatcggctcggtgttgtgtggctccacggcgttgattgccaaggcccggcgcctgcgcaagatggtgggcggtggcatgcgccaggccggttcgttggcggcggcagggctgtacgcgctggatcaccaggtacagcgcctggctgatgaccacgccaacgcccaatggctgggggatgcattgcgctaggccggctacgaggtcgagccggtgcagaccaacatggtctacgtgcaggtcggtgaccgcgcgcaggccttgaaggcgtttgccgccgagcgcgggatcaagttaagcgccgcgccacgcctgcgcatggtcacccatcttgacgtcagccgggcgcagatcgagtgtgtggttgagacatttgtcgagttttcccgaaaatgacagtgcagaccgtctaattgactgtttctatcgcataaacacgctgtaccaccggcaaagggccgatataatgcggccctttgccgtcgctccgtctgatgatgttgcgcactggcctttggccgcagcctccgtggaagaacctaatgaaaagcgcagaaatccgtgaagccttccttcgcttcttcgaagagcaaggccacacccgtgtagcctccagctccttgatcccaggcaatgacccaaccctgctgttcaccaacgcgggcatgaaccagttcaaggactgcttcctgggccaggaaaagcgcgcctatacccgcgccacaagcagccagaagtgcgtacgcgccggcggcaagaacagcgacctggaaaacgtgggttacaccgcgcgccaccacaccttcttcgaaatgctgggcaacttcagctttggcgattatttcaagaaagatgcgatcacctttgcctggaccttcctgaccggcgtgctgaagctgccgaaggaaaaactctgggtcaccgtctacgcaaccgacgacgaagcgtatgacatctggaccaaagaaatcggtgtgccggtcgagcgcatgatccgcatcggcgacaacaagggcgcgccgtacgcgtccgacaacttctggaccatgggcgataccggcccgtgcggcccgtgcaccgagattttctacgatcacggcgccgacatctggggtggcccgccgggctcgccggaagaagacggcgaccgttacatcgagatctggaacaacgtgttcatgcagttcaaccgcaccgccgatggcgtgttgcatccactcccagcgccgtcggtggacaccggcatgggcctggagcggatcagtgcggtgatgcagcacgttcactccaactacgaaatcgacctgttcaccaacctgctgagcgcctcggctgccgcgattggttgcgccaacgaaaaccagtcgtcgctcaaggtcgtgtccgaccacatccgttcctgcggcttcctgatcgccgacggcgtgctgccgtcgaacgagggccgtggctatgtgttgcgccgcatcatccgtcgcgcctgccgccacggtaacaagttgggcgccaccggcagcttcttctacaagatcgtggccgcgctggtggccgagatgggcgaagccttcccggaactcaagcagcagcaagacaacatcgagcgtgtgctcaaggctgaagaagagcagttctccaaaaccctggagcacggcctgaagatcctggagcaggacctggccgggctcaaaggcaccgtggtaccgggcgacgtggtgttcaagctgtatgacacctacggcttcccgatggacctgaccgccgacatcgcccgtgagcgcgagctgaccgtcgatgaggccggtttcgagcgtgagatggaagcccagcgcgtgcgtgcgcgttccgccagctcctttggcctggactacaacaccctggtcaaggttgacgtgccgactgagttcatcggttatcaggcgaccgttggctcggccaaaattgtggccatctataaagacggcaaatcggttgacgtattgaatgaaggcgatgaggcggtggtggtcctggaccagacgccgttctacgccgaatccggcggccagattggtgactgtggtttcctcagctcgacgtccgggcgttttgaggtgcgtgacaccaccaagaccggcggtgcattcctgcaccacggcgtgctggtgctgggcaacctgacggtcggtgcgccggtggacacccaggtcgatgccgacgtacggcatgcaaccgctttgaaccactccgccactcacctgctgcacgccgcgttgcgtcaggtattgggtgagcatgtgcagcagaaaggttcgttggttgacagtcagcgcctgcgttttgactttagccacttcgaagcgatcaagcctgagcagatcaaggccctggaagacatcgtcaacgccgagattcgcaagaacacggcggttgaaaccgaagaaaccgatatcgaaaccgctaaaaagaaaggcgccatggcgctgtttggcgagaagtacggcgacgaagtgcgcgtgctgagcatgggcggcagcttctcggtggagctgtgtggcggtattcacgccagccgtaccggcgacatcggcctgctgaaaatcatcagcgaaggcggtgtggcttccggtgtgcgtcgtattgaagcggtgaccggtgctgcggccctggcctacctcaatgcggctgaagaacaactcaaggaagcggccggcctggtcaagggcagccgcgacaacctgatcgacaagctgtcggccgttctggagcgcaaccgtgcgctggagaaacagctggagcagttgcaggccaaggcagccagtgcggcgggcgacgatctgtcggccagtgcgctggacgtcaagggtgtgaaagtcctggctgtgcgcctggacggccaggatggcaaggcgctgttggccttggtcgatcagttgaagaacaagctcggccgcgcagtgatcctgctcggcggtgtccatgaggaaaaggtcgttctggttgccggtgtaaccaaagacctgactggccaactcaaggccggtgatttgatgaagcaagccgccgcggcagtgggcgggaagggcggtggtcgtccggacatggcgcaaggcggtggtgtagacgcaggctccctggacgcggccctggccctgaccgtgccgtttgtcgaggcaggcatttaaggcgctgttaatgagcccatggtctagtcatgggctcgctcggttgcttgaatttgtttattgggcgcccctttgcgggctgaggcggcttagaaatggctttgatcgtacagaaatttggaggcacctcggtcggctctgtcgaaagaatcgagcaggtcgccgacaaggttaagaaattccgcgatgccggcgacgacctggtggtggtgctgtcggccatgagcggcgagaccaatcgcctgatcgatctggccaaggcaatcagcggcgatcaacaaccgctgccgcgtgagctggatgtgatcgtgtccaccggcgagcaggtgacgatcgccttgctggccatggcgctgaacaagcgtggtgtaccggcggtgtcctacactggcagtcaggtgcgcatcctgaccgacagcgcacataccaaggcgcgcatcctgcaaatcgatgatcagaaaattcgtactgatctcaaagccgggcgcgtggtagttgtagcagggttccagggtgtggacgagcacggcaacatcacgaccctggggcgtggcggttcggacaccaccggcgtggcgctggcagcggcgctgaaagccgatgaatgccagatctacaccgatgtggacggcgtctacaccactgatccgcgggttgtgtccgtggctcagcgcctggagaagatcacctttgaagagatgctggaaatggccagcctcggttccaaggtgttgcagatccgcgcggtggagttcgccggcaagtacaacgttccgctgcgcgtattgcacagcttcaaagagggtccgggcaccctcattactattgatgaagaggaatccatggaacagccgatcatttccggcatcgctttcaaccgcgatgaagccaagctgacgatccgtggcgtgccggatactccgggcgtggcgttcaagatcctcggcccgatcagtagcgccaatattgaagtcgacatgatcgtgcagaacgtttcgcacgataacaccaccgatttcacctttaccgtgcaccgcaacgagtacgatgcggcggagcggatcctgcagaacaccgcgagcgagattggcgcccgtgaagtggttggcgataccaagattgccaaggtgtcgatcgtgggtgtgggcatgcgttcccatgccggcgttgccagccgcatgttcgaggccctggccaaggaaagcatcaacatccagatgatctccacgtcggaaatcaaagtctcggtggtgattgaagagaagtacctggaactggctgtacgcgcactgcataccgcttttgagctggacgctccggcccgacagggcgagtgacgcaatgccaggaaggcgcggtttttaccgcgcctttcatttttttgtggggcgcatgttcttttgcgtgggctcgacaatacttaggcggtaggactatggcccttggccgtaggtcgaaggcctttttttgcagactgttgttcctgaactgaaatgcgtgaggtgaaaggtatgctgattctgactcgtcgttgcgcagaaagcctgattatcggtgatggcgaaatcaccgtgactgtgctcggcgtcaaaggcaatcaagtgcgtatcggggttaacgctccgaaagaggtggcggtccatcgcgaggaaatctacctgcggatcaagaaagagaaggacgaagaaccaagcctttaatttttatcgttttttatgtttgcaaacggggatgaacgtggttaatatacgccccgtgttgcggagagctggccgagtggccgaaggcgctcccctgctaagggagtacacctcaaaagggtgtcgggggttcgaatcccccgttctccgccattatttgcttagtacgttgcaatctggttttttcgctaagttgttgaaattaaacgaaaaaatagctttacatagagattgaacggcctataatgcgcggcaacaaatgcactcgtagctcagctggatagagtactcggctacgaaccgagcggtcacaggttcgaatcctgtcgagtgcaccatttaagagtcagttgcagcaatgcaggtgattcggcttcaaccagttgtgatctggtctaaaaacacaatctgcactcgtagctcagctggatagagtactcggctacgaaccgagcggtcacaggttcgaatcctgtcgagtgcaccatacaaacaaaaagcccgcctagtgcgggctttttgccgtctggggtttgtgtaggagttctgccttttcttctcttccatgtgttttccctccgggctgcgtcgtcgcagttcatagatgcagccaatgctcagctttggctcgcaagcgcttgttctttccagttttttaacgttaaaagcgcacgcagcgtgtatcattgcgcccgtcagccccgccggggcttgtggaatacctccatggacttacccagtagttacttagtaccccgttttaccaatcatgaattgactgattgatccttccggcgtgccccgctgctgggagtggagttcgcctatgaccgaagtagaagtaaagaaaacacaagaaagcctgcaggatcgcctggctcaagtcatcgagctgctgcagcgccagcgtgtggtcgaagacctcacgcatcgccaggaaggtccgaatcacgaccgcgtcgaaaacctggttcaccggcaaaacctcgtcgagttgcaacgcaagctcgacgacctgcactctgccgacgttgcctatatcctcgaagccctgccgctggatgatcgactgaccttgtggcagttggtcaaggccgaccgcgacggcgacatcctactcgaagtatccgattcggtccgtgaaaccctgatcgccgacatggatgatcacgaactcctggctgcggcaagggagatggacgccgacgagctggctgacctgacccccgagctgccccgtgatgttgtccatgagctgatggaggccctcgacggccagcagcgtgagcgtgtgcgctctgcgttgtcctatgacgaggatcaggtcggtgccctgatggacttcgagatggtcaccatccgcgaagacgtcagcctggaagtggtattgcgctacctgcgtcgcctcaaagagctgcctggtcacaccgacaagctgtttgttgtggattacgaagggattctcaagggtgtgctgccgatcaagcgtttgctggtcaatgatccggacaagaaggttgcggatctgatggccagcgacacggtgagctttcatccggacgaagatgcctacgatgccgcccaggcgttcgagcgttacgacttgatctcggcgccggtggtcgacaagaacggcaagctgatcggtcgtctgaccatcgatgaaatggtcgacctgattcgtgaagagagcgaaaccgaagtcctcaacatggcgggtctgcgtgaagaggaagacatttttgcttcggtgtggcgctcgctgcgtaaccgttgggcctggctggccgttaatctgatcactgcattcatcgcttcgcgagtgattgggttatttgaaggttcgatcgaaaagctggtagcactggcggcgcttatgccgattgtggctggcattggtggtaactcgggtaaccagaccattaccatgatcgtgcgtgcgatggcgcttgatcaggtcagcactgccaactcgtcacgcctgatgcgcaaggagctggcggtggcactgatcaacggcctggtgtggggtggggtgatcggtatcgtcgcctacttgctctacggcagttggtcgttgggcgttgtgatgacggccgccatgacccttaacctgcttctcgctgcgctgatgggggtgttgatccccatgaccctcgcgcgccttgggcgtgatccggcaatgggtgccagtgtgatgattaccgccatgaccgacagcggcggctttttcatctttctcggtcttgccaccatcttcctgctctaatcccctccggcgggaactcattggttcccgcccgttctcctcccgaattccacgcaaaaaaaagccagcacatggctggcttcggctttcaattgcagatcagttggcttctgcggccgcctcaacgtcgtgcgcgataagcgagacgagagcattttgctggcggtgggagagctgacgaaaacgctgcagcagttcgcgttcgtgcagtgacagctcagggctgtccaggcgcatgctcaactcttcgcccaacgcaccttcctgaatgaggctctgttccaggcgcgcgatgatttcggagttcatgctgcggtgatgattgcgagccacctcggcaatgcgttcccgcattccgtctggcagacgtacgacgaacttgtcagccgtacggctggaataaattgcctgtttcaatgggcgcatatatttaaccggttagttcaggggagcggttcttggaattggccgcaaggatgagtgttaagacaagactcacgaccaaagttcaacccgaattgcaaagaggccgcatcatgcctcagatttgacagttccttggcgtcaattctgtgacaaatattgaactgcctaaaggctttatgccagcactcatttgcatttttgcggactggtttgaaaacttttcaacaggtccctttgtattggaatgtttcccgaaaattcaggtcgcaccggggtttcaggccgcacatcctatagcaaagtggccttttgcccttaatctttagactagtggcaatttgccgatttacgagtacgaggcgacataaggtagggcggggagaggagggtttcagcgtaaaaccgggtcaaatttgatgcgccgccctagcgcgagcgtcagcagcagaaggctggccagcacgccagcggcaatgaatgcgatggtctgtgtgtcctcgctgctggcgctgatgcctagagcgccgaagaggagggtgaggcataaaataaaccaggcgagtttggtcatgaacagttccttagaacacccagtgttcggacgccggtgcggcctgagtgccttgggtcaggtagatcggcaattgcacggtaggcgtcatgacagccagttgcggacgttgctgcaaatgatgtgggactgcctggctgatttgtgcaggatcatcgctggcggacgattgaaagtggaatgtcaccagtgcagccaaggctacggtgttgagggctaacaatagggcactgttcatggtcatgttctccgcttaacgccttggctgatggggtttgcagaagaagtattgcaggtgtcgtgccaacctattaattcaataaaaacaatgggttgggtctactttgacgctggcttgtgttgcaatttgcaatgcgctcattttaaggggcgtgcaatctgcacgatgggggctgtgccggtagtcagaaggggcgcgccgggcctgtttaacaaaggatcggcctacactcaaaaagcccaaggacgacatgacaaaacctaccctggccgttaacatgcacgccgtctgtcgccgcgacgttggttcggtggctgtcatttgtcccagtagctcaattggatagagcatccccctcctaaggggaaggttggccgttcgaaccggccctgggacaccagattcaaagccccgctcagattcgtctggtggggcttttttgtgactgacttttaaacaccggtcgaaccttagcggcgatagaggttcacagccggtgcggcatttatttctcttgccctgtgtaccttgcacgcggctaggcaacgtctgagctattagcaaaatattccccggaaacagcgcgtaccgcctgtccgtacgcggcaaccccggactatcattccgatagccctgtctctcactgcaaggagccgctcggaacgccgatgcgccagatctggaaatcttttcgagccctttatttcgcctccctgatgatgctgatcggctccggcctgctcagcacctacctggccttgcgcctggcggctgaccatgtcgacagcctgtgggtgggcgcattgatggcggccaactacttcggcctggtgctgggcggcaagatcggccatcgcttgatcgcccgggtcgggcatatccgcgcttacgccacctgtgccgggatcgtcggtgcggcggtgctggggcatggcctgatcaactggctacccgcctggatcgtgctgcggatggtggtgggcctggggatgatgtgccagtacatggtcatcgagagctggctgaatgagcaggccgacgccaagcagcgtggcgtggtgttcagcggctacatgattgcgtcttatctggggctggtgctggggcagctgattctggtcatgcacccggaactcggcctcgaattgctgatgctggtcgcactgtgtttcgcgctctgcctggtgccggtggcgatgacccggcgcattcatccggctccgctgcaccctgcgccgatggagccgcgcttctttatcaagcgtgtgccgcagtcgttgagtaccgtgttgggagcgggtgtgatcgtgggctctttctacggtttggcgccgctgtatgcctcccagcaagggctgacgactgagcaagtcggtttgttcatggggtgctgcatttttgccggcctgttggtgcagtggccgttggggtggttgtcggatcgctacgaccgtgcgttgttgattcgcagttttgccctgtgcctggcggtggcggccttgccgttggcgatcatgacccaggtgccactggaggtgctctttgtggccgggttcttgtgctcgctggtgcagttctgcctgtacccgttggccgtggcattttccaatgaccacgtggaaggtgatcgccgagtctcgctgacggccatgttgctggtgacctacggtatcggcgcgagcgtcgggccgttgctggcgggcgtggcaatgaagctgttcggcagccatatgttgtatgcgtttttcagcctgtgcgcgttgattctggtgtggcgtatccggccgaaggcggtcaccaacctgcatcaggtagacgatgcgccgctgcaccacgtggcgatgccggacagtatgtccagttcgccgctggtcgcctgcctcgatccgcgggtagatgaggctgtagtgcaagagcagatgcaaagccctgtgccggatgcggccccggaaacgggtccgcaggccccaatggatgagccgcccttcgtaggcccgccggccccgccagacccggacgaccatcctcacgacttgagcagggcccgcccctgaaagcaaaaacgggcagaacccatcaggttctgcccgtttttttggtcgcgacctttaaggcttaaagatcgtcgtctttgtcgaagcgccgcgcttcgcgttgcaactggtacacaaaccgctccacctggcgctgcaccaggccgctcatgttgtggaagcgtacaccggcgaaggtggtgttgatcttctcttcgaagtgcaggtaacgcagctcgacggacgtggtcatgctgccgaagggcagggcggcgataaagcggtcgtagacttggcccagttgcaggcgctcggagatctcgccttcaaagcgcaatttgcagccggtggcagagatgtcgagcagcttgccgctgatcggtgccttgagcttttcgccacccaattcgatgctgaccagttgtgccagcttcagcgcggcgcgaaaggcattgcgacgctgatggtaaaccacctcgtcgggcatgctgccggtgtaaatgcggtggccgtctttttcgctgatggccaggctgccgttgctttcccaggcgacccgcacaccgtcatgaaagccttcgatgcgaaagggctcgccattttccaggtagcgctcgccatcacggggaatcatttcgtccagggccagcgtcttgctgtcccggtcaacgtccaccagataactttggaagcgctggctgcgttcgtggaaagtgatgatcagtggatcatggctttcttgcagcatccgcaatgtgctggcgatttccagaggcgtggtgagcaccttgggtggctgcggagcatcttccgcattaagggcgttgaacacggttcttccatctccagacaaaatacgactacacgcaagaaccggcattttgccagtatgtagcgcgccttggataggtgcgctttgaaccggcgtcaggcttggctgcgggtgctgggtttgaccaggcgtgaagtggagccttgggcgttatagagggccggaggctctccgccgtggagtatacgtaactggttggcggtcgtggcttgctgaagctggatcgactgaccgttgagcaggttggcttcctggcactgggcgagcaattggttgagtgcggcgctttgcgtcagcaactgatcgccgaccgaggagtgactggccagttgggcgaggccatcatggtctgccggcaagccgaggctgacaagaatctcgctgcgcttcttgccatgctgctccagcagcacgatcagcgattgcttgcgcgccaggatttcttccagcaagcgcatgtcccggccatagagtgccagggattcttctttgagcagctcgagcaaatgttgcgtcggcgccagatcatcaatgatcagttgaagcaaatgttcgtcgtggtgcatggctggccttgggttttaagcgtccaaaagccctgcgcaggcctttgcctagcgctcggcttcgaagttaagcagcttgctggctacacggttgctgtcgactttatagctgccatcggcgattgcctgtttcaactcggccacgcgggctttattgacaaccggctggtcgcgcagcgagtcagtgaccttctgcaactgttgagcctcattgctcaggtgtacggattccccgctttggctggcgccggcctgttctgtcttggccgcaggtgccggctgggacttggcttcaacgctgtccttggccccgctggtgcgcgtattgcccggcaaagcctgggaattattcaaacgactgaaatcgatgaccatgataaaaaaacctctgggtatttggacgcttgccatgttttcggccatacccggacaaactttaggctcgattgacaataaacctgtacgcgcgaacgtctggcgcacagtgtaggaaaagcgggcgtcctgtgccagtaaactataaagccacctcgacctgccccggcgcggtcacctgcgccttgatcacacggttggagttgaggttcttgaccctgatctgttcgctcatgccgccattggacaatgcctcacccggcatctttaccgtcagcgcaccgctgctggcggaaatcaccacctggtcgcctttgcgaatcacctcggcctgctccagatgtaccagggtaatcacttgatcggtcaccatcgggcgggtcaatttctgcccaaccgcctggtcgatggaggtgaggtagccctggctgatcaggctgatgtcccgttcgcgcagggcgacatcgccgaaaccgataataccggtgcgtttcaacggccgtgtcaccaccaccacatcacggaacagcttgacctgcgccggcacgaagaccgtccagggcgaggcgccttcacagcgcacttttaccgtcacacggccgatgggctgggcagggctttccaggctggctgtcaattccttgtcgcacatgggcatgcgcaggcgcgggtccagctggctgacctggatttcataacggcccggggtctgggtggtcgccagataatcttctacagtgaactcaagaaagccctgagtgacgccgataaggagatcaggcaaggtgacgttgtctgcgcgggccgtggcgcccagccccaaggcgaacagcgtcagcagtacacagagctgtctgtaataccgtgcaaggcctgggcgtcgggaaactgtcgttttaatatccatgaccaaccagatagcaaagctcgtgccgtttagagtcagcggtgcgctgccctgcaagtatcgccaaaggttttagcgtaggagtaaaggcatggcaggtgtaatggattcagtaaaccagcgcacacagctggtagggcagaaccgcctggagttgttgctgttccgcctggacggcaagcagctgtatggcatcaatgtatttaaagtgcgggaagtgttgcagtgtcccaagctgactatcctgcccaaatccagccctgtggtgtgtggcgtggctaacatccgtggcgcgaccattccgattcttgatctggcgatggccaccggctctgcgggcttgcaggaccgcgagaacccgttcgtgatcatcaccgaatacaacaccaagacccaggggttcctggtgcgctcggtggagcgcatcgtcaacatgaactgggaagagatccatccgccgcccaagggcacggggcgcgatcactacctcacggcggtgacgcgggtcgacaaccagttggtggaaatcatcgacgtggagaaaatcctcgccgaagtggcgccgacctcggaaaccatctcggtcggcgtggtggacgccgaaaccgcgcacaaggcggtatcgttgcgggtgttgaccgttgacgactcctcggtggcccgcaagcaagtgacccgctgcctgcaaaccgtaggcgtcgatgtggtcgccctcaatgacggccgccaggcgttggattacctgcgcaagctggtggatgaaggcaagaagcctgaagaagaattcctgatgatgatctccgacattgaaatgccggaaatggacggttacaccctcacggccgagatacgtaacgatccacgcatgcaaaagttgcatatcatcctgcatacttcgttgtcaggtgtattcaatcaggcgatggtcaagaaagtcggtgccgatgacttcctggccaaattccgacctgatgacctggcatcccgggtagtcgaccggatcaaggcagcagatcacggctaaggggatttcccctggcggtcacacgatttaagaggcggtatcattgtctacgggtaatttggatttcgaacagttccgggtcttcctggaaaaagcctgtggcatattgctcggtgaaaacaagcagtacctggtatccagccgtctcaacaaactgatggaacagcagggcatcaaatctctgggggagctggtgcagcgcatccagggtcagccgcgcagcgggctcaaggagatggtggtcgatgcgatgaccaccaacgaaaccttgtggtttcgcgatacctacccctttgaagtgctaaagagcaaagtgctgcccgaggcgatcaaggccgcaccgggccagcgcctgcgtatctggtcggcggcctgttcgtcggggcaggaaccgtattcgatttcgatgtccatcgatgagttcgagcggaccaacatgggccagttgaaggccggcgcgcaaatcgtcgccaccgacttgtccggcaccatgctcaccaactgcaagaccggcgagtacgacagcctggccctgggccgcggtttgtcccaggagcgcctgcagcgttacttcgacccgaaaggggcggggcgttgggcggtcaaggcaccgatcaagagccgggtggagtttcgctccttcaacctgctcgacagctatgccagcctgggcaagttcgacatggtgttctgccgcaacgtgctgatctacttttcggccgaagtgaaaaaagacatcctgctgcgcatccacggcacactcaagcggggtggctatctgttcctcggcgcttccgaagcgctcaatggtctgcccgatcattaccagatggtgcaatgcagccctggcatcatttatcaggccaagtgacaggtgattgagtcaaaacgggaagcgcctcaaggcttcccgttttttttgcgcgaagtacggcagtttgagttcaaggcctggccgtcaggcggatattactcagtgaaagacggtggatgccgttgggcaccgccttattgaaaatacctagccgtacatcgcctgtgagcggggcaatgaagctgccggtaccggtttgcggccggacttgagtaatgttctgtacgtccggcccgatctgagtgccattcatcgtcatgtacaggattgagccatcgctggtagccgcgcctccaatgacatcaaaactgcagtcatacgtacgcccggcgatcaccggcacaggccgggtaatgatgtgggcgctggtagcctggctgtttggaaggtcgacgaccacgctggaattgataatgtgcagtaaccctcccacgtaaggcccttgcggtacccagccttgaaaggtgccgtcgttgaaattccatactgtgggcgcaggcgggacaacgatggggcgcgcgttgatgctcactctcgcggtgggtgccggggtgatcagccgtccacgccttatctgcagcagcaaattgacaatcgttccggcactggcttcaacgaaccccctgggtatcaggagttcctgcccgggagcatcttgagcaacatcaaagctttggttgtactcgccaccgaggatggtgctgctcagcgtcaggtagattcggtccgcgcgctcgaccggaaaatccagtgccagcctggcagaggggccaacgatactgttggtattaaggttcggaatgggggaagccgaatcttgatcgataaatctgggtggcaaaggagtcagcatttttcttgcctcagtatttcgcgcgaagggggctgcctaatcaggcgtccgttgtgacaggtatcgcaactgtcaaaaataacagtgccgatgaacggcccggaatgttcgcttccctcactggcctcctgcctctatcgcataagcggcaacctcccattgccgctttactggcgccacgcggaaatcggttgccgcttttctggcattgccgccggcaaaatcctcgcaaacccctgagttacggggctcaggcaaactggcatgggccttgctataaccctgttacgaaaagcaggtcagcctaaaggtttccgccatgagcatcagcttcgataaagcgctcggtatccacgaacaagccctgggcttccgcgcccagcgtgccgaagtcctggccaacaacattgccaacgccgataccccgaactacaaggctcgggacctggacttctccgccgtgctcgctgcacagcaggacaagaccaaaaacggcaccttcgccttgaacatgaccaacagccgtcatatcgaagcgcaaggcctgagcagtggtgacgagtcgttgctgtatcgcacgccgatgcagccgtcgatcgaccagaacaccgtcgacgcccagctggagcaatcggcttacgccgaaaactcggtgaacttccaggccagcttcaccctgctcaacagcaaattcaaagggctgatgtcagccctgcgtggagagtaagccatgtctttagccagtgttttcaatattgccggcagcggcatgagtgcccagaccacgcgcctgaacaccgtcgccagtaacatcgccaacgccgagaccgtgtcgtcgagcatcgaccagacctaccgcgcccgtcacccggtgttcgccaccatgttccagggcggccagagcggcggcagcgattcgctgttccagaaccaggacgccgcaggccagggcgtgcaggtgctcggcgtggtggaagaccagagcaacctggaagcccgctacgagcctaaccacccggccgcgaacgaaaagggctacgtgtactacccgaacgtcaacgtggtcgaggaaatggctgacatgatctccgccagccgctcgttccagaccaacgcggaaatgatgaacaccgccaaaaccatgatgcagaaggtcctgaccctgggtcagtgataaggggcgccaaataatggccattgttgataccacgtctacacccaacacgccggtccaggacctgttcaattccaaggtcaagacctcgacggataacagcaaccttggcgatgcggccaaggccgcgacgggtaaccaatcgctgggcaaggacgcgttcctgcaactgctggtgacccagctgaaaaaccagaacccgctgtcgcctcaggacaacggcgcgttcgtggcgcaactggcgcagttcagcagcctggaagggatcaacaccctgaacgactcggtgaatgcgatctccagcaacttcagctcctcgcaggcgctgcaggcgtcttcgctggtaggccgttcgatcatcacccagaccgacaaagcgatggtcgacaccagcaagagcatgaccggctcggtcgcggtgacggcggcgacgggcaacgtctcggtgaaaatcactgacaaagacggcaacgtggtgcgcacgatcgacatgggtgcccagagcgccggtgatgccagctttatctgggatggcaagaccgacaagggtgatgtcgcccccgccgggacttacaccttcgcggccaccaccaagaatgacaaaggcgattcggttgccctcgcaacttcgctgccggcaacggtaaccagcgtgaccttgagcaagaccggcggcgaaatgctgctcaaccttgcaggcggcatgggcagcgtcaagctgtcgcaaattcagactatcggtacatagagccggctaaatacggcagaaggagagaaacatgtcttttaacatcggccttagcggcctctatgcggccaacaaacaactggacgtgaccggcaacaacatcgccaacgtcgcgaccaccggtttcaagtcgtcccgtgccgaattctcggacatttacgcggcgtccaaactgggcaccggccagaacagcgtcggcaacggcgtgaacctggcggccgtgtcccagcagttcacccagggtgacgtcaacaacaccggcggtattctggacatggcgatccagggcggcggcttcttcgttcagaagggcagtgacggttcgctggaatatacccgcagcggctcgttccgttccgacaaggacggctacatcaccaacaacaccggcacttcgcgcctgcaaggctacgccgcggatgccgatggcaatatccagaagggtggcctggtcgacctgcaactgaacctggcgaacctgccgccgaaggcgtccaccaaagtggactccaccagtaacctgaactcgtcttcgcctgtcatcgaccagacggccaagccgttcgacccaaccgacaccagcactttcaccacccaataccccaccactttgtatgacagccagggtaactcccacgcgatggtgcagtatctggtcaagactgactccaatacctggaagtcctatacgctgatcgatggccgcaaccctgacggttcggcgccgaccggcaccggctccaccccaccgacggcgtcgacattgagttttgacggctccggcaaactcaccgggattgtgaccggtacgaacaccagcaccacgttgcaacttacaggttgggtgccaggtaccgtgaccaatggcgtgtggaaagcgaacggcgcgacagccaaccccggtggcatcgccatcaacatggccaacatcacccagtacaactcggccacctatcgcaacccgccggtcactgatggctacgccaccggtcagatcaccggcctgaaaatcgacggcagcggcgtactgtttgctacgttcagcaaccagcaaagcaaagccatcggccagatctccctggccagtttcaacaacgagcaaggcctgcagcccaatggcggcactacctggaaggaaaccttcgcttcgggccagcctggctatgattccccgcaatccggcaccctgggcgccatcgtggccaactccctggagaactccaacgtcaacctgaccaacgagctggtggacctgatcaaggcccagagcaactatcaggcgaacgccaagaccatctccacccagagcaccatcatgcagaccatcattcagatgacgtgatgcggtagcgctccacaagaagcccctcacacgaggggcttttttgtggctggcgtttagcgagagcacaactcggtcaactgtgggagcgagcaagtcgaatcgtcgcaccgccgctcccatacaagcccgctccacagggttaatgtttgtggcaaaagaaaacccccggcaaacccagggggttcgtcgggggtttggagtaagcgccttttggcgcttaccggctcagcttactggcaagcttcgcaatccggctcatcaatcgcgcaggccttaggcactggcgccgggccggcgggtgcggcgagaaccgaatcatcaccgtggttgccgctggaaacagcgttcagcttgccggtgttgatggtcgacttctcagtgctggtcgcggccagggcacggaggtagtaagtggttttcaggccacggtaccaagccatgcggtaggtcacgtccagcttcttgcccgaagcgccggcgatgtagaggttcagcgactgagcctggtcgatccacttctggcgacggctggcggcgtcaacgatccacttggtgtccacttcgaaggcggtcgcgtagagctctttgagttcttgcgggatgcgctcgatctgctgcaccgaaccgtcgtagtacttcaggtcgttgatcatgaccgagtcccacaggccgcgggctttcaggtcgcgaaccaggtacgggttgatcacggtgaattcgcccgacaggttcgatttcacatacaggttctggtaagtcggttcgatcgactgcgacacgccggtgatgttggcgatggtggcggtcggtgcgatggccatgatgttggagttacgaatgcctttctgcacgcgggcacgtaccggcgcccagtccagggattcattcaggtcaacgtcgatgtacttctggccacgctgctcgatcaggatctgttgcgaatccagcggcaggatgcctttggaccacagcgaaccctggaacgtctcgtaggcaccgcgctcgtcggccaggtcgcaggaagcctggatcgcgtagtagctgaccgcttccatggacttgtcggcgaactcgaccgcagcgtccgaaccgtaaggaatgtgctgcaggtacaaagcgtcctggaagcccatgatgcccaggccaaccggacggtgcttgaagttggagttctgcgcctgtggcaccgagtagtagttgatgtcgataacgttatcgagcatgcgcactgcggtgttgacggtacgttccagcttggcggtgtccagcttgccgttgacgatgtggttcggcaggttgatcgagcccaggttgcaaacggcgatctcgtccttgttggtgttcaaggtgatctcggtgcacaggttcgagctgtggaccacgcccacatgctgctgcgggctgcgcaggttgcacgggtctttgaaggtcagccatgggtggccggtttcaaacagcatggacagcattttgcgccacaggtctttggcctggatggtcttgaacagcttgatcttgccagggtactgggacagggcttcgtagtactcgtagcgctcttcgaaggccttgccggtcaggtcgtgcaggtccggtacttcggaaggcgagaacagggtccactggccgtcatcgaagacacgcttcatgaacaggtcagggatccagttggcggtgttcatgtcgtgggtacgacgacggtcatcaccggtgttcttgcgcagctcgatgaactcttcgatgtccatgtgccaggtttccaggtaggcacacacagcgcctttgcgcttgccaccctggttcacggctacagcggtgtcgttcaccactttgaggaacggtacaacgccctgggacttgccattggtgcccttgatgtacgaaccgagtgcgcgcacaggggtccagtcgttgcccaggccgccggcgaatttggacaacatggcgttgtcgtggatcgcgtggtagatgcccgacaggtcatccggcacggtggtcaggtagcagctcgacagctgtggacgcagggtgccggcgttgaacagggtcggggtcgacgacatgtagtcgaaggacgacaacaggttgtagaactcgatggcacggtcttctttctgcttctcttcgatcgccaggcccatggccacgcgcatgaagaacacttgcggcagttcgaagcggataccgtccttgtggatgaagtaacggtcgtacagggtttgcaggcccaggtaggtgaactgctggtcgcgctcgtggttgatcgccttgccgagtttttccaggtcgaaggtggcgaggaccgggttcagcaattcgaattcgatacccttggcgatgtaggctggcagggccttggcgtacaggtcagccatctcgtggtgggtggcgctgtcggcgactttcaggaaacccaggccttcggcacgcagtgtgtccatcagcaggcgcgcggtcacgaacgagtagttcggctcgcgttcaaccagggtacgggcggtcatcaccagggcggtgttgacgtcggtcagggccacgccgtcgtacaggtttttcagggtttcgcgctggatcaggtcaccgtcgacttcttccaggccttcgcaggcctcggtgatgatggtgttcaggcggcccaggtccagcggtgcaaacgtaccgtcggccagggtgatgcggatcgacgggtgagcttgtaccgcagcctcttcagccggggagcgcacggcgcgctctttggagcgggcatcacggtagatcacgtagtcgcgggcgactttctgctcgccggcacgcatcagggccagttcaacctggtcctggatttcttcgatatggatggtgccgcccgaaggcatgcgacgcttgaaggtcgcggtgacttgttcggtcaggcgggcaacggtgtcgtggatgcgcgacgaagcggcagcggtgccgccttcaactgcaagaaacgctttggtgatggcgacggtgattttgtcatcggtgtaaggaacgacagtgccgttacgcttgatcacacgcaattggcccggcgcggtggcggacagatccaggttcgaatcagcggcctgcggcacggagccttgcgggttctcgcgagttgtgtcggtttgcatggggggttgtctccacgttctatatttgattgcgagtgccaggctcttcctgcaacacccgtaccgttttccatatcggggatgggaaacagctgccatccgcgtgagcggtttggtctactgaaaatcggttggttccatgctgcggtagcaataaaacgcttgagtttttagccacttgtgtggttgggcgcttttgccgaaaaccccacatgtagggtcttccaaggcgccgaggtacaagataatgcgttttcgaggggttagcaacgcagtaacctgtggataacgctgtgagtaaaatgtgtaagaaagggtgaatggctgtgtaggccgcatagctgctggattggaccgtttgtcattaaatgtttcggcgttaaaacaacctgccgattttcgaagggcgcgaaccctatcacaaaaaaacgcgatcaccgaatggatttcccggcttgtgctatagggctggcgcatggctacaatcgacccttgttatgccctcaaaacatgacaaaaagggtacgaccgacgaagatcaaactgtgggagcgggcttgcccgcgaaggcggtgtatcagcaccctgttcagtgactgacactgcgctttcgcgggcaagcccgctcccacatttggacctccaccggtgagaagaacgtctaacaacaacgaggcccccccgtggagcaagaagcctggcaaatattgatcgtcgaagatgacgagcgactggccgaactgacccgtgattacctgcagagcaacggcttgcaggtgtcggtggaaagtgacggcgccaaagccgcggcgcgcatcatcgccgagcagccggacctggtgatcctcgacctcatgctccccggcgaagatggcttgagcatctgccgcaaggtgcgcggcagctacgacggggtgatcttgatgctcaccgcgcgcactgacgacatggaccaggtgctcggcctggacatgggcgccgacgactacgtgtgcaaacccgtgcgcccgcgcctgttgctggcgcgcatccaggcgcttttgcggcgcagcgaaccggccgaaccggccgctgtggaaaaccagcgccgcctgaaattcggccccttggtggtggacaatgctctgcgtgaggcctggctgaacgagggcggtatcgagctgaccagtgcggagttcgacttgctgtggttgctggtggcaaatgccgggcgcattttgtcccgcgaagaaatcttcatcgccttgcgcggtatcggctacgacggccaggaccgttccattgatgtgcgcatctcacgcattcgcccgaaaatcggcgacgaccccatccacccgcgcctgatcaagaccatccgcagcaaaggttacctgttcgtccccgaagctgccgccgacatgccgctgtgaactcgatcttcctgcgcatctacggcggcatgtgcgcggcgctgattctggtggcgctgctgggtgtgctggccctgcatctgctgaatgaggtgcgcagcggccagtaccgcgagcggctggcccatggcacctttgcgttgatgggggacaacctgcaacccatgagcgccattgagcgccagcgcgctctggcggtgtgggagcgcctgctgggcattcccctggaattgcgcagccttgccgacgcccagttggacctgagccagcgcaaccgcctgcaacgcggccaggtgctggtcgagcagaccgggccccacgccgcacgcgtgctgcggctggtcagcgagaaggaaccgtgggtgctgacgggcgaggtgcagcagatcagcgaacaactggcccgcgcaacgatttacctgctggccgatgaactggtgcgtttcccggtggccgaacagccgcagcggctggccgatataaaggaagccaagggttttggctttgagatgcacctgatgaccctcgatcaggcggacatggacgaagaccagcgccgccgcgtatcggaaggcgatacggtgatggcgctgggcaagggcggcgattcgattcgcgtgtttgccggcatggtcggtacgccgtgggtgctggaaatcggcccgctgtatcaaatgaactcgtatccgccgcaatggttgatcctgatcgcattgatcagcctgaccctgatcggcttgatcgtctatttattggtgcgccagcttgagcggcgcctcaaggggctggaggctgcggccacgcgtatcgccaaaggcaacctggaggtacgcgtgccggcccggggcgcggactcggtggggcgtctggcggccgcttttaacggtatggccgagcatttacagcaattgctggcgatccagcgcgagttggtgcgtgcggtgtcccacgaattgcgcaccccggtggcgcgcttgcgcttcggcctggagatggtcggtgacgccgccacgcctgaagcccggcgcaaatacatggaaggcatggacagcgacatccaggacctcgatggcttggtggatgaaatgctcacctacgcgcgcctggagcagggggcgccgcagctgaatttccagcgggtcgacctcagcgcgctgctcgatcaagtgatcggcgaattatcgccactgcgcccgcaggtcacggtaacgcggggtatttgcctgtcatcggcgcacctggacgacgcttgggtcgacgcagaaccccgttacctgcaccgcgccctgcaaaatctggtgagcaatgccatgcgccatgcccagggccaggtgctgatcagttaccaggtggggcaggtgcgttgccgaattgatgtggaagatgatgggccgggcgtaccggaaagcgcctgggaacggatcttcacgccgttcctgcgcctggacgacagccgcacgcgcgcttcgggcgggcatgggttggggttgtcgattgtgcggcggattatttattggcacggcgggcgggcgttgatcggcaagagcaacaatctgggcggggcgtgctttagcctgagttggccaagggatcaggagaaggcttgagattgccatcgcaggcaagccagctcccacaggaggagtgcacttcaaactgtgggagctggcttgcctgcgatagcaatctatcaggcgccgacagccaccaggctcaacaactgctccccgtccaccgcaaactgcccctccaattctttgccatgacaccactcggtcgacagatccgtcagcaaccgtagccgaacctggcccgattccgaccactccaccacctcggcatgctcaaagtaaaagcgcttctggacaatcgggtagagcgccttgaacaggctctccttgaccgagaacgtcagcgtcaccaccagggcaacctgctcgcgcggcagggcggccatgcgctgcatctcatccgccgtcagaatctccccggccaggcgttctgcccgttccacagaaagcaagttttccaggtccatccccagcccgcgccattgcgccttgtgcccgacaatcgccgccgcgtgcccggtgctgtgggtgatggagccgctgatatgcccgggccacactggcgcacggtcgtctccgatggcgggcacgcagtccaggtggtccagctgttgcagcgcggcgcgggcgcacaggcggccggccaggaactccgcctgacgcttggccaccgagcgctggatgctggccggaggcggtacggcgctgcgctggaaatcactggcgtccagtaaggcgggatcaaatcgcgtgctcagaaatactgtccccggcaaaggggcgggcagcggccaatgggcatcaagtggggtgcagcaagcgggtaaaggcatcatgcgcggtattttgcgtcagttggcgcgccagtggatagcccgtaacggttcaggcgcggttcagagcctgttcagggggagttcaggggcgcatgcgtagtctggccctacagccaaaacgcgtagaggtaagcaccatgactgcgatcaaaaagctgatgttggcgttaaccatgctcagtgccaccgctggggttcaggcctccgatggcgcctttgcagcatttggcggcgagaaaaccaagaaatccagcaccctgatccagcgtgtcagcttcgaagacgccggcagccagcccacgccgtgggggcagtcgctgggcctgaccaccccacaaccggcctaccgcaccggctatgaacacctcactggccaatacaatggcaataaactgcgcccgcaagacttgcagggccgctatgatatccctcagtcggacagttgaatcgccttggagagccttatgaaattgctggtggttgaagatgaggcgttgttgcgccatcacctgctgacccgcctgacagacagcgggcatgtggtcgaagccgtggccaatgccgaagaggccctgtaccagaccggccaattcaaccatgacctggcgatcatcgacctgggcctgcccggcatgggcggcctggacctgatccgccaactgcgcagccaggccaagacctttccgatcctgatccttaccgcgcgcggcaactggcaggacaaagtcgaagggctggccgctggtgccgatgattacgtggtcaagcccttccagttcgaagagctggaggcgcggatgaatgccttgctgcgtcgctccagcgggtttacccagtcgaccatcgtcgccgggcccttgttgctggacctcaaccgcaagcaagcgtccctggacgagcaaccgctggcgctgaccgcctatgagtaccggattctcgaatacctgatgcgtcaccatcagcaggtggtcgccaaggaccgcttgatggaacagctttaccccgatgacgacgagcgcgatccgaacgtgatcgaagtgctggtcgggcgcttgcgccgcaaactggaaggcccggccgggttcaagccgatcgataccgtgcgtggcttgggctacctgttcaatgagcgctgccgttgattcgctcgttacgcgtacgcctgatgctcgcggccaccaccctggccgtgttgttcatgctcggcttgttacccgccatgcaaggcgcgttcagcctggcgctgcaggattccatcgagcagcgcctggcgtcggacgtcaccacgctgatctctgccgcgcgggtcgaaaacaaccgcctgttgatgccggcccagttgccggacgaacgcttcaacctgaccgatagtcggctgctcggctatatctacgaccgcgaaggccacttggtatggcgctcgcgggcgacccaggaagaaaacatcaactacaagccgcgctatgacgggcgcggtaatgaatttgcgcgcatccgcgaggccaatggccaggaattctttgtctacgacgttgaagtcaaactgctcggcggcaagagcgcagcgttcagtatcgtcgcgctgcaaccggtgcgcgaataccagctgacccttgaggggttgcaggaaaacctctacctggggttcggcgcggccctgctggtattgctgaccttgctctggctgggcctgacgtggggcctgcaagccttgcgccgtttgagccaggagcttgacgagatcgaaggcggcacccgtgaaagcctttccgaggagcatccgcgcgagttgctgcgcctcaccggttccctcaaccggttgttgcacagcgagcgcgagcaacgggcgcgctaccgcgattccctcgatgacttggcccacagcctgaaaactccgctggcggtattgcagggcgtgagcgaggacatggcccagcgccctgaagaccgcgaccaggcttgggtgctgcaatcgcagatcgagcgcatgagccaacagatcggctatcaattgcagcgtgccagcctgcgtaaaagcggcctggtgcgccaccaggtgcgcctggagccggtgctgcagagcctgtgtgacacgctggacaaggtgtaccgcgacaagcgtgtacgggtgtcctttgacctgccgcccgattgcgacgtgcccatcgagaagggtgccttgctggaaatgctcggcaacctgctggaaaacgcctatcgcctgtgcgtgcgcgaagtgcgcatccgcctggtcgagagccttgaaggtaccgagttgtgcatcgaggacgatggccccggcgtaccgcccgaccagcgtgcgcggattctgcaaaggggtgaacggctggaccgtcagcatcccgggcagggcatcgggctggcggtggtcaaggacatcatcgaaagctacagcgcgcgtttgaccctcggcgactcgcctttgggtggggcggccttcaggatccactttccggcagtctgatctttagtggctgtgtcggcctcatcgcaggcaagccagctcccacaggtaaacccgatcactgtgggagccgggcttgcccgcgataaggccagtacaggcgctgcatgtctaatgctcttgctcgcgataagcccccggcgtcagccccgtccacttcttgaacgcccgatgaaacgccgatggttcggaaaaccccaactgctcggcaatctcttgtaatgacaaatccgcgcgccccaaatgatagatggcgatatctcgccgcaactcatccttgagcgcctgaaaactggtgccttcttcacgcaaatgcctgcgcagggtttgcgggctgatatacaggtgctgggcgacggcctccaggtctggccagggtgtgcggtcgcggctgagcaagcggcgcagttggctgctcaaactgtcgccctcgtcagggcgcgacaacaggtcggcgggcgagcgctccaggaaatgtttgagggtccgttcgtcctgcaacagcggcaggctcaaataacgggcaggaaacaccaggctgctgttcggtgcgccgaacacctgggtgcagggaaacaaaaggtcatattccccggcatgcgccggagccgggtagctgaaagtggcctggtgcagccggatgcgctggccgatcaaccaactgcccaggcggtgccagatcaccagcaggcattcgctgaggaagtggtccgggtcccacaactgtgagtcgtccaggctcaagcgcgccatgtcgccttctctcgtcagctgccagcgcggaccctgcgggaataggctataaaataataagccgcgttccagagccttctccagggtgcggcaatgaatcagcgcgtggcacatcatggcgaaagtgccgcgtttgctcgggccctgcgcaaagcccagatactcgtcgtccagcgccagccaaagcatttgcaacaaccgggtgaattgctcgggggcgatgcgggcgcggggctcggtcaacaggtcgggcgtgatgccgacttgatgcaacagggccgagtagtcgtaacccgaccggcgtgcaccgccgagggcggcccgggcgtagtggctggcgatggtacgttcacgcatgtgatggcctcgtccatggaaggacggatggtagccatcacccgatcgagcgacaaggcggatatccgccaaattgcaggacgggattcggcgagtgggcggaaatccgccaccttgttcgatgcttcgaagagtgattgaaatcccccaaggctgatgtctaaaggccttcagggttatttcagagaagtggcacggcgtttgcgataaggattacagcgcaggcctgctttaaaggatctcgcaaacaacaaatccctccagtgcaggagggttcgcaattcaagtgtcgtgggcaatggcggatctttgccacacgggacgattgaggaactttgcaatgacgactcgtcagccactgtacaaatccctgtatttccaggtgatcgttgcaatcgttatcggtattttgctcggtcacttctacccgcagaccggcgtggccctcaagccactgggtgacggctttatcaagctgatcaaaatggtcatcgccccgatcatcttctgcaccgttgtcagcggcatcgctggcatgcaaagcatgaaatcggtcggcaaaaccggcggctacgcgctgctgtacttcgaaatcgtttccaccatcgccctgctgatcggcctggtcgtggtcaacgttgtgcagccgggcgccggcatgcacatcgacgtcgctaccctggatgcctctaaagtcgcggcctacgtgactgccggtgcagaccagagcatcgtcggcttcctgctgaacgtgatcccgaacaccattgttggcgcgttcgccaccggcgatatcctgcaagtgctgatgttctcggtgatcttcggtttcgccctgcatcgcctgggtgcctacggcaagccggtactcgacttcatcgatcgcttcgcccacgtgatgttcaacatcatcaacatgatcatgaagctcgcgccaatcggtgccctgggcgccatggcgttcaccatcggcgcctacggtgtaggttccctggtgcaactgggccaactgatgatctgcttctacatcacctgcatcctgtttgtgctggtggtgctgggcgccatctgccgcgcacacggtttcagcgtgttgaagctggttcgttacattcgtgaagaactgttgatcgttctgggtacttcctcctccgaatccgcactgccacgcatgctgatcaagatggagcgcctgggcgcgaagaaatccgttgtaggcctggtgatcccgaccggctactccttcaacctcgacggtacttcgatctacctgaccatggcggccgtgttcatcgctcaggcgactgacacccacatggacatcacccatcagatcaccctgctgctggtgctgctgctgtcctccaaaggcgcagcgggcgtgaccggttcgggcttcatcgtgctggccgctaccctgtccgctgtaggccacctgccggttgccggcctggcgctgatcctgggtatcgaccgcttcatgtccgaagcccgcgcactgaccaacttggtcggtaacgccgttgccaccatcgttgtggccaagtgggtcaacgaactggacaccgacaagctgcaaagcgagctggcgtctggcggtaccggtatctccgacacccgccaggaagatgacctgggcgtggctgaaggccctgctcctgccgtcaagtaaaatgcctgaggtgtagataacaccgaaagccttgcaaacgccccgacttgttcggggcgtttgcgtttctggagggtcactttttgcattacagtaacgttttgcattgaaacgctttcgggaggcctgatggacagtgtggatctgaacgtcctgcgcagcgtgctcgaatggcgccgcgccgggcaacgtgtggtgttgtacagcgtggtgcagacctggggcagtgcgccgcgtccgccgggtgcaatgttggcactgcgtggcgatggggtggtgatcggttcggtatccggtggctgcatcgaggatgacttgatcgctcgtctgcaagatggtcgcctcccggaggatggccctgcggtgcaactggtgacctacggcgtcacgcgtgacgaagcggcgcgttttggcctgccgtgcggtggcaccttgcgccttaccgaagagcgcgtggtcgactgggagtgggtcgcgcagttgctggcccgctgtgaggaccaccagattgtcgcgcgcgaactgaaccttgccacgggtgaggtgaccctcaccagtgcgagtaaaacggacgtggtgacgttcgatggcgaacgcctgcgagccatctatggcccacgctggcgcttgctgttgatcggcgccgggcagctgtcgcgctatgtggcggaaatggcgcgcctgctggatttcgaagtgttgatctgcgacccgcgcgaagagttcgtctacggctgggaagatcagcacggccgctttgtgccgggaatgccggacgaggcggtgctgaatatccagaccgatgagcgcacggccatcgtgtgcctgacccatgatccacgcctggatgatatggcgctgctcacggccttgaattcccctgcgttctacatcggtgccctcggctcgcgagtcaacagtcacaaacgtcgggaaaccctggcggcattgggcttgtcggcgcaggccattgcgcgcctgcacgggccaatcggcttgcatatcggcagccatacgcctgcggaaattgccttgtcgttgctggcggaaattgtcgcgatcaagaacggcgtggcacctatgcagaagaaaccgttgccggcggtggctgagtgacggtcaccgcgattgtgttggcggcggggcagggcagccgttttcgggctgtggcaggggctgatcaggataagttgctggctgagtgcgcaggcctggatggcgtggtgcggccggtgatcgagcaggtgctgataaacctgcctgagcgcgtcgtgaagcgttgggtggtgacgtcacctgatcgtgcgcaggtcattcggttggccgaagcctatggttgtgacgtcctgctgctgcgttcggctggcatgggcgacagtattgcagcggcggtggcggccagtggccaggcagatggctggttggtggtgttgggggatatgccgtttattcgatcgtcgagcattgagcgagtgatcgatggattggaagagggcggtatccgtgtgccgatgcagggcgggtgctatgggcatcctgtggcgtttggccaggcattagggcctgggttgatggccttgaccggtgatcgtggcgccaagccgttgtttgctcaggcgacagtgcatgaagtgttggtagaggatcctggtgttctctgggacgtcgacctgccgcactccctcaacttcaccccgatctaggtgtgggagcaggcaagccagcttccacagtcgagtgcatttcaaataatccgaatagcataaaaaagccccgcctgatcactccggcggggcttttcagtcactgatggaatcagaccagaggtttgctctcgtgttctgcttccagtgctgctgcagcggcggctgcttcagcttccttgcgacgacggcgcacttcgcgtgggtcattcggtgcacggccattttcagtcagggcgctggcgggggcagcttcaaccactggagctgccacttcagcaactaccggtgcttcaaccactgcttcaggctcggcgaccggagctggctcgaccactggggctggctcggcaactacgacctcggcaaccggcgctgacgcttcttctaccacaggggcaggcactggcgcttcaaccggggcggcgggctcggcagtccattggaaggcggtttgttcttcgcgaacttcacgcacttccggggcggcttctacgaccggtgcttccacaaccgcctcaaccactggctgggcttcaaccaccggagcgggttcagcagcaaccacttcagcttccggcttggcttcgtgtaccggagcaagttccacttccggcactaccggcgcttcgaccggggtagtcgcttcaacaaccggtgcttcaaccactggcgtttcaacgacaggcgcttcagcggctggagtttcaacagctggcgcttcaacagcggcggtctcttcgacagcggcggtagcgcgttcagcctgctcgtgggcctgagcttcagccggtgcgctgataaccgagctggcaaccgctgcggtaacggccaggccggcagccagttcggcgccagtcggttcgcgggtttcgccttctgcgttctcgccggcttcttccgagccttcgatcacgttgccgttggcatcacgttgacgctcacgacggttgctgcgacggcgttggccacgggagcggcggcgtggacgatcgccttcggcgttgtcctggccatcttcctgttgctcttcaccggtcagcacttcttcttcgctggcggcagcggcttgctcggcgcgtggttgacgctcttcacgcggtgggcgcggctggcgctcttcacgtggggcgcgctcttcacgcggctggcgggccgggcgttcttctgtagaggcttcggctgctgcggctggcaccgcgtccaacggctcgcgcagttcgcgcacacgctcttcgcgttcgccacgtggcttgcgatcttcgcgcggagcacgcggggtgcgtggtgcgcgctcttcgcgcggtgcacgttcttcacgggctacggctggggtttcttcacgggcttcgcgaggtgcacgctcttcacgtggagcgcgctcttcacgcggtgcacgttcttcgcgaggcttgcgctcttcgtcacgacgaccgttgcggttacggctctgctgacgaccgttgcgacgctcttcgttgcgtgcagggcgttcggtggcaggtttttcaaccacaaccggggcaacgggctcttccttggaggcgaacaggctgaccagcgacttcaccaggcctttgaacaggcttggctcaggcagggcggccggcgcggcaaccggagcagcggcttcggtcggaaccggtgcattggcacgggctggcgcggttttaacggcggcttcctggcgaaccagggtgcgggtcgcggcggcaggctgcacttcttccacttcagcggcggcggcagcgatttcgtagctggattggccgctgtgggcttccgggctgtcgtcacgcaggcgctgcacttcaaagtgcggcgtttcgaggtgatcgttcggcagaatgacgatacgggcacgggtgcgcagttcgatcttggtgatcgagttgcgtttttcgttgagcaggaaggcggcaaccggaatcggcacttgcgcgcggacttcggcggtgcggtctttcagggcttcttcttcgatcaggcgcaggatcgccagggacagcgattcaacgtcacggatgatgccggtgccgttgcaacgcgggcagacgatgccgctgctctcgcccagggatgggcgcaggcgctgacgggacatttccagcaggccgaagcgcgagatgcggccgacttgcacgcgggcacggtcagcttccaggcattcgcggactttctcttccacggcgcgctggttcttggccggggtcatgtcgatgaagtcgatcacgatcaggccgccgatgtcacgcaggcgcagctggcgggcgatttcttcagccgcttccaggttggtctgcagggcggtttcttcgatgtcgctgcctttggtcgcacgcgccgagttgatgtcgatggacaccagggcttcggtcgggtcgatcacgatggagccgccggaaggcagttcaacgacgcgctggaaggcggtctcgatctggctttcgatctggaaacggttgaacagcggaacgctgtcttcgtacaacttgatcttgctggcgtactgcggcatcacctggcggatgaaggtcagggcttcgtcctgggcttcaacgctgtcgatcagcacttcgccgatgtcctggcgcaggtaatcgcggatggcacggatgatcacgttgctttcctgatagatcaggaatggcgcggagcgatccagggaggcttccttgatggcggtccacagttgcagcaggtagtcgaggtcccactgcatttcttcgctgctgcggcccaggcctgccgtacgaacgatcaggcccatgtcggcgggtgcgatcaagccgttcagcgcttcacgcagttcgttgcgctcttcgccttcgatgcgacgggaaatgccgccggcacgcgggttgttcggcatcaggaccaggtaacggccagccaggctgatgaaggtggtcagggctgcgcccttgttgccacgttcttctttttcgacctggacgatgacttcctggccttcgctcaggacgtccttgatgttcacgcggccttcgggggctttcttgaagtattcgcgggagatttctttgaggggcaggaagccgtggcgctcggagccgaaatcgacaaaggcagcttcaaggcttggttcgatgcgagtgatcttgcctttatagatattggcttttttctgctcgcgcgcaccggattcgatgtccaggtcatagaggcgttggccatctaccagtgcaacacgcaactcttcgggttgagttgcgttaatcagcattcttttcatgttgtaccgtcggtttccgggctgccggaaacggcgttcggcacacacgacttctcacggtcggtgtcaggtgcgtcaagagtggttggccactccagtgtccagcaaacaccggccaattgggccggtatcgcgacggacgcgtcctgcttgttagcggtggtgacaaaggcaccacttcaacaaaagctaaggtcaggaggaggaatcaaccggcgactgtggacgagatgaagcgtctaaatataagcctagtgctacacggtccgacggttgtgcatctccaccctacacgtatccctgataattcgggtgctgccgcgcgcagaatccgcagcgggttggcatttaccgtgttctccaatggggagtccacgctcatggctaaacaagactgggtgggggcgactgcgctctcactcagctcttaacaggcgttgtttccgaagtattcgccgtggtccggttcaagactgactgcactttgtgaactggccgtaaatatcggcgcagaacgcgagtattcactctgctttctgcactcgcttcaggcctcatgtcacctgcgcttgttacaatcttgagccttccagggtggcgaaagccccgtaggacggcctcgcgtcctgatgaattgcgatggtcagggccggcagtttgccgcaagtcctctgtccaggccgcttttggcggcgttcgcgactatagcagcaatgattaagtgcttcaattccataaaaaattgttatcatcgccgccatgacgactcccgacccccagacccccagcgtccagctgcttgaggtctcgccggaatatgccggccaacgcatcgacaattttctcctggccaggctcaaaggcgtgcccaagaccttgatttaccgcatcttgcgtaaaggcgaagtgcgcgtgaacaaggggcggatcaagcccgagtacaagctgcaggcgggcgatatcgtccgtgtgccgccggttcgcgtgcctgaacgtgacgagccggttccgctggcccagggcctgctgcagcgccttgaagcctcgattgtctttgaagacaacaagctgattgtgatcaacaagccttgtggcatcgcggttcacggcggcagcggcctgacgtttggcgtcattgaagcctttcgtcagttgcgcccggatgccaaggagcttgagctggttcaccgcctggaccgcgatacctccggcctgctgatgattgccaagaaacgcagcatgttgcgtcacctgcacaccgccctgcgtggtgatggtgtggacaagcgttacatggcgctggtgcgtggcaactgggccagttcgatcaagagtgttcgtgcgccgttgcagaagagcaacctgcgctccggcgagcgcatggtcgaggtggacgaggagggcaaagaggcgctgaccctgttcaaggtgctgcgccgttttggcgacttcgccaccctggtcgaggccaagccggtcactgggcgtacccaccagattcgcgtgcacaccctgcacgcaggtcactgcattgccggcgataccaaatacggcgacgaggatttctccaaagagattcgcgacctgggcggcaagcgcctgttcctgcatgcctacatgctgacggtgccgttgcccgatggcggtgaactgaagttgcaggcaccggtcgatgatatgtgggccaagaccgtggagcgtttgagtgtcgcaccttgattacaagctgctgatttttgattgggacgggacgctgtgcaattccattggccgcatcgtggagtccatgcacgccgcctcgacccgctcgggctatgagttgtgcactgatctggcggtaaaggggattatcggcctgggtttgcccgaggcgatccgtaccctgtacccacagatcagcgacgctgaactggtcgcttttcgcgaccattacgcagaccactatattgcgctggaggctacaccttcgccgttgtttgacggtgtgctgcagtcgctggaagcctttcgctgcgagggttaccacctggcggtagcgaccggcaaggcgcgtcgcggcctggaccgtgtgctcaaggctcacggctttgaggattttttcgatatcacccgcgcagcggatgaaaccgccagcaagccgcaccctctgatgcttgagcagattctggctcactgcggcgtagcgccgcgccaggcgttgatggtgggcgatgcctccttcgacctgatgatggcgcgcaacgcgggcatggacagcgttgcggtcagctacggggcccaggcagccgaggctttgcagcaatacgagccgcgcctgacgattgatcatttttccgaattgcaggcctggctgagccgggcccaataagtctttgctggggttgatggcatgagtgacgagtggaaagcgcctgaaaaggccgatagcaatgacgacaaaagctggaagttgctggagaagacgttgctggccagcgtgcaggagcagcgtcgttcacggcgctgggggattttcttcaagctgctgactttcgtatacctgctgggcatgctcgcgttgttcagcccgctgatggacatggaaaaaagcgccacgcgcggcagtaactacaccgcgctgatcgaagtgcgcggggtgatcgccgacaaggagtccgccagcgccgacaacatcgtcagcagcctgcgcacagcgtttgaagatcccaaggtcaaaggcatcatcctgcgcatcaacagcccgggcggcagccctgtgcagtcgggttacgtgtatgacgagattcggcgcctgcgcgcgttgcatccggacatcaagctgtatgcagtgatttccgacttgggtgcttcgggcgcctattacatcgccagcgccgcagaccagatctatgccgacaaggctagtttggtgggctccattggcgtgacggcggccggttacgggtttgtcggcaccatggagaagctgggtgtggagcgccgcacctacacgtcgggcgagcacaagtcgttcctcgatccgttccagccgcaaaaggccgatgaaacccagttctggcaaggcgtgctcgacacgactcatcgccagtttattgccagcgtgaagcaggggcgtggggatcgtctgaaggataaggaccatccggagctgttctccgggttggtgtggtcgggcgagcaggcgttgccgctgggcttgatcgatgggctgggcagtgccagctcggtggcgcgggatgtgattggcgagaaagagctggtggattttactgtgcaggaatcgccgtttgaccgcttctccaagaagctcggtgccagtgtggcggagaagcttgcactgtacatgggcttccaggggccgaccctgcgctgatttcggctctgatgacgatcaaaatgtgggagcgggcttgcccgcgatagtggcaggtcagtcgacattgaaagtggctggtttaccgctatcgcaggcaagccagctcccacatttgttttgtggtgggcttaagggatttgtacgccttcagccagcagcatgttgaccaggctaatcagcgggagtccgaccaggctggtcgcatccggcccgtcagtactctggaacaggctcacacccagcccctctgccttgaaactgcccgcacagtcatacggctgctcgatccgcaggtagcgctcgatgcgttcagcgtcgagttcgcgcatgtgcacggtaaacggcacgcaatcgacctgacagtgccctgtttcagtgttcagcagtgccagcccggtcaggaagctgactcgtttaccgctggcggccatgagttgttcgcgagccttctcaaaggtgtggggtttgccgataatgcggccttccagtgccgccacctgatcggaaccgatgatcaaatgccctggatggctggcggcaagcgcgcgagccttctgttcggccaggcgtttgaccagttcaattgcgggctcgtcagcccgatggctttcgtcgatatccggcgagctgcagatgaacggcaggtgcaggcggctcagcaattcccgccgataaaccgagctggatgcgagtaataaaggcagcatgggcgtctcctcaaggcagcgggcgattctagcgaagcgaccggctgacgcacagggctgaatttcctttgacatggctgggtgcatccctataatgctgcgcctatgttgaatgacccgattccacctcacgttgacccgcgcaaattggctgatcgtggcacttcccttcaaggtgaactgctgctggccgatttggagagactctgcgacccgctttccgacactgtcggtacggtgcaggccaaattcgtttttgaacgagatgaacgtaagtctgtggtaatccacagttttatcgacaccgaagtcaaaatggtttgccagcgttgtcttgagctggtcaccctgccgattcacagcgaatgcagttacgctgtggtgaaggagggtgcgaatacccagtcgttgccgaaaggttatgacgtgctggaactgggcgaagatcctttggatctgcatgcactgatcgaggaagagcttctgctcgccttgcccattgtgcctgctcatcatccggaagaatgccagcagccggaggggcttgatgacgagcccgagccgagcgaggacgaggtaacgcggtccaacccgttcagtgtattggcgcagttaaagcgtgacccaaacgtttaggagttaatcaattatggctgttcagcagaacaaaaaatcccgctctgcccgtgacatgcgtcgttcgcacgatgccctgacggcgagcactctgtctgtagaaaaaaccaccggtgaaattcacctgcgtcaccacgtatcgccagaaggcgtataccgtggtcgtaaagtgatcgacaagggcgctgacgagtaatcacttgtctgctctagtcatcgcgatagacgcaatgggcggggacttcggtccccgcagcattgttcaggcctgcattgccagcctgtctgcaacgccctcgctgcacctgacccttgtcggtcaaccctcactccttgaagaattgattgccagccatccggcggtggatcgcgcgcgcctgacgattacgccagccagcgaaaccattggcatggacgaaaagccggcggcggccctgcgtggcaagcctgactcgtcaatgcgggtggcccttgagttgttgcgcgacgccaaggtgcaagcctgcgtcagtgctggcaatacaggcgctttaatggcgttgtcgcggcatgtgctcaagaccctgccgggcattgaccggccggcgatggtggcggcgattccgacgcagaaaggctactgccagctgttggacctaggcgcgaacgtcgattgcagcgccgagcacctgcttcagtttgcggtgatgggatcggtggcagccgaggcgctgggtgtggcccgacctcgtgtggccctgctgaatatcggtaccgaggacatcaagggcaaccagcaggtcaagctcgccgccaccttgttgcaaggggcgcgaggcttgaactacatcggttttgtcgaaggtgacggtttgtatcgcggcgaagcggatgtggtggtgtgcgacggatttgtcggcaatatcctgctcaagtccagcgaaggcctggcgaccatgatcgccacgcgtatcgaagcgctgttcaagcagaacctggcttcgcgtatggtcggcgccctggcgctgcctttgatgaagcgcctgcaggctgacctggcgcccgcgcggcataacggcgcgagctttctgggcttgcagggcatcgtgataaaaagccacggctcggcaggtgtgcaaggctttcagagtgcgattgcgcgggccttgatcgagattcaggaaaacctgccgcagcgcttgcacggccgtcttgaggatctgttgccttaggcgaatcggcccggaaatgcttaaatgtgaccggccagttcaattgaccatccaatctgtcagtttcgtgcgctcccaccgtaggcgtgcacatttttgacgaccagatcattaggggcttgttacatgtctacatccctcgcattcgtctttccagggcagggttcgcagtccctcggcatgttggccgagctgggcgcgcaatacccgctgatcctggaaaccttcaaggaagcttccgatgcactgggttacgacctgtgggcactgacccagcaagggccggaagagcaactcaatcaaaccgataaaacccaaccggccatcctgaccgcttcgatcgccctgtggcgtttgtggctggccgaagggggcgcgcgcccggcatttgttgccggtcacagcctgggtgaatacagcgccctggtggcggcgggcagcctgaccctcggtgaagcggtcaagctggtcgagcgtcgcggtcaactgatgcaagaagccgttccggccgggcagggcggcatggccgctatcctgggcctggacgatgctgtggtcatcgaagcctgtgccgaagcggcacaaggtgaagtggtcagtgcggtgaacttcaactcccctggccaggtggtgatcgccggtgcaaaggcggccgttgagcgcgccatcgatatttgcaaggcgcgtggtgccaagcgtgcgttgccgttgccggtgagcgtgccgtcgcattgcgagctgatgcgcccggctgccgagcgttttgccgagtccatcgcggccatcaactggcaggcgccgcagatcccgctggtgcagaacgtcagcgcggccgttgccgccgacctcgacaccctcaagcgcgacctgctggagcaactctacaagcctgtgcgctgggttgagtcggtccagaccctggccgccaccggtgccaccgagctggtcgagtgcggcccgggcaaagtcctggctggcctgaacaagcgctgcgccgacggcgtatcgactgccaacctgaatacccctgacgccttcgctgccgctcgcgcggcgctggcctgaacccctgaacgaaggagaagcctgcatgagtctgcaaggtaaagttgcactggttaccggcgccagccgtggcattggccaggcgatcgccctggagctgggccgtcagggtgccgttgtgatcggtaccgccacctcggcttcgggcgctgagcgtatcgccgcgaccctgaaggaaaacggcgtgcaaggcaccggccttgaactgaacgtgaccagcgacgagtcggttgctgctgtgctggccgagatcaccgcgcagttcggcgcgccggcgattctggtgaataacgccggtatcacccgcgataacctgatgatgcgtatgaaagacgacgagtggtacgacgtggtcgataccaacctgaacagtctgtttcgcctgtccaagggcgttttgcgcggcatgaccaaggcgcgttggggccgaattatcaatattggctccgtagtgggtgccatgggcaacgcaggccaagtaaactatgcgtccgccaaggccggtctggaaggtttcagccgtgcactggcacgtgaagtcggttcgcgctcgattacggtcaactcggtggccccagggttcatcgataccgatatgacccgcgaactccccgaagcacagcgtgaagccttgctgacccagattccgctgggccgtctgggccaggctcaagagatcgcgaacgtggtcactttcctggcatctgacggtgcggcatacgtgactggggctacaatcccggtgaacggcgggatgtacatgagttaaattgtgacggatcgcttcaaaaaaatgtcatacgagctgtctaaaatccgttataaagctgcaacttaatttataggcaggtggtctgccgggtacaagggtgaagctttcagttgaaaagctgaaaagcctttctatacacttacccactggccagctgcctgaatttgtccattaggagttaaacaaggtatgagcaccatcgaagagcgcgtcaagaaaatcgttgccgagcaactgggcgttaaagaagaagaagtgaccaactccgcttccttcgtagaagacctgggtgccgattcccttgacaccgttgagctggtgatggctctggaagaggaattcgagaccgaaatcccggacgaagaagctgaaaaaatcactactgttcaagctgctatcgactacgttactgcccaccaggcgtaatagtttgtagtcgtcgcttgctgttgggaaaaaccgcactgctgtaacggcgtgcggttttttctttagcggcgatcaaaagtgagctctgaagcaaagtgtcgtcattagaaaaaggagagtgctgtgtcgcgtagacgcgtcgtagtcaccggtatgggtatgttgtcgccactgggtacggatgtgccgagcagttggcagggcattctggctggccacagtggtattggtctgattgaacacacggacctttctgcctattccacccgttttggcggctcggtaaagggcttcaatgtcgaggaatatctctcggtcaaagagtcccgcaaactcgacctgttcattcaatacggcctggcagccggttttcaggcagtgcgtaacgccggcctggaagtcaccgacgccaaccgtgagcgcatcggcgtggccatgggttcgggtattggcggtttgaccaatatcgaagaaaccagccgcacgctgcacgattccggcccccgtcgaatttcaccgttcttcgtgccgggctcgatcatcaatatgatttccggtttcctgtccatccacttgggtgcacaggggcctaactacgccattgctacggcgtgcaccacgggcactcactgcatcggcatggcggcgcgcaatatcgcctatgacgaagcggacgtgatgatcgccggcggtgccgaaatggccgcctgtggcctcggtatgggcggcttcggcgcgtcccgtgcactgtcgacccgcaacgacgaaccgacccgtgccagccgtccgtgggacaaaggccgtgacggtttcgtgctgtctgacggtgccggtgccctggtcctcgaagagctggagcacgccaaggcgcgtggtgccaccatctacgccgagctgatcggttttggcatgagcggcgacgcctaccacatgacctcgccgccgtccgacggtgccggtgctgcacgttgcatcaccaacgccttgcgcgatgcgaaggtcaatgccaaccaggtgcagtacatcaacgcccacggcacgtcgacgccgactggcgatttggcggaagccgaagccatcaagtcggtgttcggcgagcacgcctacaagctggcggtcagctcaaccaagtccatgaccggccacctgttgggtgcggcgggcgcggtcgaggcgatcttcagtgtcatggccatcaaggatcaggtcgctccgccgaccatcaaccttgatgagccggacgaaggctgcgacctgaacttcgtacctcacgaagcgcagccgatgccgatcgacgtggtgatttccaactcgttcggttttggcggtaccaacggttccctggtgttccgccggttcgccgagtgatggacagctgggtcgacggtcagccagcgggcagcgtgcccttgaaagaccgtggcctggcgtatggcgacgggctgtttgaaacagtcgccgtcaaggccgggcagcctgtgctgcttgaccgccacctgcaacgcctcgccgagggttgcaggcgcctggcctttgttgcggatcacgcgctgatccgcagcgaggtgctggcctatgctgctgccctgggcgacggtgtactcaagttgatcctcacccgtggcgacagcctgcgcggttacggcatcaacgctggcgcacctgtgcgtcgtatcctgcagggcaatccgcctgcctcttatcccgacgctcatggaacccaaggcatccgcctgtttccgtgcgctactcgcttggccgagcagccgttgctcgccggtctgaagcaccttaaccgtctcgaacaagtgatcgcgcgcaccgagtggcaagacgccgagcatgccgaaggcctgatgctggatgtgtctggccgagtgatcgaaggcgtgttcagcaacctgtttctggtgcgcaacggtgtattgctgaccgctgatctgaatcgctgcggcgttgccggcgtcatgcgcgccgagatcctggctcaggcgcacaccctgggcctgccggtggccgtggccgacatcagcctggagcagttgcgccaggcggatgaagtgtttgtgtgcaacagcgtgtatggcatttggccggtgcgtagctgtgctgcgatgagctggccggttgggccgctcacccgtaaactgcagggcattgttcgcgcgctattggatatttgagttgatacgaaaactggttttactgctgcagatcggtctggtctcggcaggcttgctgctgggcttctcggcctggaagcttgactctgccttgaagcagcccttgaatctggctcaggaacaattactcgacgtgcctgccggggccacaccgacgggcaccttcaaccgccttgaaagcgaaggcgtgctcgatgatgccttctggttgcgcctgtactggcgctttaacctcgacggccagccgctgcacagtggcgaatatcgcatgaccccgggcctgaccgctgaaggcctgatcggcctgtggcagcgcggtgaagtggtgcaatacagcctgaccctggtggaaggctggaatttccgccaggtgcgttcggccttggccaagcacgagaagatcgtgcaaaccctgtccggcctcagcgacagcgatgtgatggataagctgggccaccccggcgtgtttcccgaggggcggttcttccccgacacttaccgcttcgtgcgaggcatgaccgacgtcgatttcctgaaaaaagcctacaaccgcctcgatgatgtactcgctcaggagtggagcaaacgcgccgccgatgcgccgtacaccgacccctatcaagcgctgatcatggcttcgctggtcgagaaggaaaccggtgtacccgaagagcgtgggcagatcgccggtgtgttcgtgcgccgcatgaaaatcggcatgttgctgcaaaccgacccgaccgtcatctacggcctgggtgagcgctataacggcaagttgacccgcgcgcacctcaaggaagccaacccttacaacacttacatggtcgccggcttgccgccgacgccaatcgcgatggttggccgcgaagccatccatgccgcgctgaacccggtgccgggcagcagcctgtatttcgtcgcccgtggcgacggcagccatattttctccgatgacctggatgcacataatgccgccgtgcgtgagttccagctcaagcggcgtgccgattaccgttccagcccggcgccggtggtgaaaccgcctgacgaggcaatgccaccggctgatgcacctgttgaaaagcctgcaatcgagcccgcgccggacaccgccgcgccgcaaagcccgcaatgactctgactaaggactgcctgtgactggcttgtttatcaccctggaaggcccggaaggtgccggcaaaagcaccaaccgcgattacctggccgagcgcttgcgtgccgaaggtatcgaggtggtgttgacccgcgaaccaggcggcacgccgctggccgagcgtattcgtgaagtgctgttggcgccgggcgaagaacagatgaacccggataccgaactcctgctggtgttcgccgcccgtgcccagcacttggccgaagttatccgcccggccctggcgcgcggtgccgtggtgatttgcgaccgttttacggattcaacctacgcctatcagggcgggggccgcggtttgtccgtggagcgcattgccacgctggaaaccttcgtacagggtgacctgcgccccgatttgaccctgttgttcgatctgccagtggaagtcggcatggcccgcgccagtgcccgtggccgcctggatcgcttcgagctggaaggcgacggcttcttcaacgcggtacgcagtgcattcctcgcactcgccaacgctgagcccgggcgttactccctgctggatgccgcccagccgttggcccaagtgcaacaggccatcgatgcgctgctgcccacacttctggagcgcgcccgtggctgaagcctacccgtggcaggacggtctctggcagcaattggccggccgtgcccagcacgcccacgcctatttgctgcacgggccgatcggtatcggcaagcgtgcgttggccgagcgcctcatggcgagcctgctgtgccagcggccggtcaacctgcaagcctgcggcgagtgcaaatcctgcttgctgctcaaggccggcagccacccggataactacctgctggagcccgaggaagccgacaaggcgatcaaggtcgaccaagtgcgtgacctcgtcagcttcgtggtgcagaccgcgcagatgggcgggcgcaaagtggtgttgatcgagccagtggaggcgatgaacatcaacgccgccaacgccttgctcaagagtctggaagaaccgtcgggcgatacggtgctgttgctggtcagccaccagtccagccgcttgttgccgaccattcgcagccgctgcgtgcagcaggcctgcccattgccgagtgaggcggcgagcctgcaatggctggcgcaggcgctgcccgagtgctccgccgatgaacgggttgagttgctgaccctggccgcaggctctccactggcggccgtgaagctgcaagcccaaggcgtgcgtgaacagcgtgcgctggtagtcgatggtgtgaagaagctgctcaagcaggaacagtccgctacgcaattggctgaaagcgcctggaaggatattcccttgctgctgctgttcgactggttctgtgactggtcgagcctgatcctgcgctatcagttgacccaggatgaaaacggcttgggcctgccggatatgcgcaaggtcgtgcagtacctggcgcaaaaaagtgcccaggacaacgtattgaatatccaggactggatcctcgcccagcgccagaaagtactcggcaaagccaacctcaaccgtgtgctgttgctcgaagcgctgctggtacagtgggtcggtttgctcggccgccgttaattttcgtggctgacgggtgtatcgtcggccagacatttcccgtgactcaagttgtaatccctatgctcgtagattcccattgccaccttgatcgccttgacctcgcccagcacggcggctccctcgacgctgcccttcaagcggcgcgccagcgcggggtagggcacttcctgtgcattggcgtcagcgccgaaaacgccgccgacgtcaaagccctggctgatcgttatgccgatgtggattgctcggtgggcatccacccgctggacttgaagcccggagaagcgcccgctctggattggctgctgggcgagctcaaccatccgcgtgtggtagcgattggcgaaaccggcctggattaccactacgagcccgaagccgccgagttgcaacaggcctcgttccgcctgcatctgcaagccgcgcagcagaccggtaaaccggtgatcgtccacacccgtggcgcccgcgcggacaccctgaccttactgcgcgaagccgcgctgcctcaggccggtgtgctgcattgcttcaccgaagactgggacatggccaaagccgccctggacctgggcttctacatttccctgtcgggcatcgtcaccttccgcaacgccgatgcgctgcgggatgtagcgcgccaggtgccggccgatcgcctgctggtagaaaccgactcgccgtacctggcgcccattccccaccgcggcaagccgaacctgccggaatacgtgcgtgatgtggcggattacctggcgatgctgcgcggtgagtcgtatgagcgttttgccgaacagaccaccgagaacttcaagcgcctgtttcccctggcgcatgttgccggctgagactgccaaatcgcaggcaaaaaaaacccgggttctggggggtgaatccgggctaagaccattaggagtaaaacaagggcacacagtccgtcggtacccgggtcaacgcgtcacttgggggagatgccgcgtcgactattgaagtattgatcatgatcccattcagtccagtcgcgattggtcgttttttaaacagatttggaatacgcgcgcttcgcttgagttctcattgagcgggtgcacgggtgaagttattgcgtattgtttctgaccgggagggcttaaaacgttggcgtgctgaaagttaagtgcggaacgggttcacataggcgttgcccaacgactgttcagtcgggataatccctcgcacctggtaaatcgtatcgccacgtatcaatggccctgcgaattccctcccacattgacctctgcagacctcttcctcatgcaaaaagaaccccgtaaggtccgtgagtttcgccgccgtgagcaggaaattctcgacaccgcactcaaactgttcctcgaacagggtgaagacagcgtcaccgtcgagatgattgcggatgccgtgggtatcggcaaaggcacgatctacaagcacttcaagtccaaggccgagatctacctgcgcctgatgctcgactacgagcgcgacctgaatgagctgctgcattcggccgatgtcgataaagacaaggaagccctgtcccgcgcctatttcgagttccgcatgcgtgacccgcagcgctaccgcctgttcgaccgcctcgaagagaaggtggtcaagggccatcaggtgccggagatggtcgaggagctgcacaagatccgcgcctcgaacttcgaacgcctgacactgctgatcaaaggccgcatcagcgaaggcaagcttgaagatgtgccgccgtatttccactactgcgccgcctgggcgttggtgcacggcgctgttgcgttgtaccactcgccgttctggagcaatgtgctggaagatcaggaaggtttcttccagttcctgatggacatcggtgtgcgcatgggcaacaagcgcaagcacagtaccgagttgccaagcgctgagccgaagaacagtgataccccggcagcctaagtcattcgccgcagtgatggcctaatgatttactgccaggggcgatgccccaggaatatactcaggcaaggatcttgctaaaagttgatttataggtcagtttttagcgcgcccgaatcatcctctgccggagtgatccatgatcgttgatcgtcaaggcaggcgttttcgcaatttgcggatcagcctgacctcagcctgcaattacgcatgtacctactgcgtgcctaacggcaagcggctggtggctgcccaggacgaactctcggccgaagccatggcccgtggcgtggcttacctgattgaggcggccggcatcgaccgcctgcgcatcaccggcggcgagccgctggtcagccccaaactggaagccttcatgggcgcagtagggcagatgggcctcagtgacatcagcctgaccaccaacggccaactgttggcgcgcaaactgccgctgctggtggacgcgggcatcaagcgcatcaacgtgtccctcgacaccctggacgccgacgccttccgcagcatcgcccgtggcggcgacctcgccaccgtgctcgacggcatggaccaggcccgcgccgccgggatcaagatcaaggtcaacatggtgccgttgcgcgggcagaacctcgaccaagtgatgccgctgctcgactactgccttgagcgtggctacgaattgcgctttatcgaactgatgcgcatgggccatctggccaaggactcgaatgccttcctgcagcaatttgtcagcctgcaacaactgctgagcttgatcggcgaacaccacgaatacctgcaagccaatgcgcccgtggacgctacggcggtgcgctacgaagtgccgggcaagggcttcttcggcgtgattgccaacgagagcgtgccgttctgccgtacctgttcgcgcctgcgcctgtcgtcgaccggttggctgcatggctgcctgtcctcgagtaaccgccactatgtcggtgacctgctggacaagccgcgccatcaggcactcccggccttgcaaggcctgttgatgaaggcgctcggcgacaagcaggaagtggcgttctccggtggcgcgacgatcatgaagatcatcggcggctaaccggctgacgcatttccctgtgggagagggcttgtgtgggagctggcttgcctgcgatagcatcaaccaggtgtgactgatacaccgaggtgcctgcatcgcaggcaagccagctcccacatttgatttgtgttgccgttaaatggcgcagaacctgcatctcacgccccattcgccggttttccgtcaccggcttctggaggattaggatgcgtagtctggttttgttgctggcgtcattgacgctgagtggttgcatgaccgtcagcgatatggccgaaggcacccgctatcagatgagcgacgccggcttgctggaccacagtgatacccgccgcactgcatcgatccgcatacagccggattcctttgtgttcatcgcccagggcgcctttgtgcccccgggcagcgcgtatccgcgtccaaatgtggtggctgaagaagccttcaacggcttcgtcgaatacttcccgatggtacgccgtgcccgtaagccggaaggccttgaacaagccatgtccgaagcccgtgcggccggtgctcactacctgctgtattgccgctttgcggcagccgatgaccgtatcggcaatgccgatgaatggaccgatcagcaagccctcgaccgggtgggcctggacagcggcgtgatccaaatcatgttgatcgagaccagcacccagtatttgattgatactgcacgcattcgcagccgtggcggtttactgacgttccacgacaacaagccagaagatctgattgcccgccctctggcacagtacgcccgcggcctgctgggcatgggggatcagtaaacaaaggagagccccatgaccgattccaacgacctgttggcccaactgcccaaaggcaaggggccggcgccggtgcacctgtggaacccggatttttgcggcaacatcgacatgcgcatcgcccgtgacggcacctggttttaccagggcacgccgatcgggcgtaagccaatggtcaagctgttctccaacatcatccgccgcgatggcgatgagtactttctggtaacgcctgtagaaaaagtcggcatcaccgtcgaagacgcgccattcgtggcagtcaccctgggcgttgaagggcagggcgaaagccaggtactgcgctttaccaccaatgtggacgatcaaatcgaggcgggtattgaacaccccctgcgtgtggtgatcgaccccgtcacccaggaacccgcgccttatctgcgcgtgcgcaccaaccttgaagccctcgtacaccgcaacgcgttctaccaactggtcgagctggcggtgagccgcccgatcaacggtcagaactggctgggcgtgtggagcggcggggagtttttccctatcggtctggaaccctgagcgcggttttttcatctccctgaaataattcgcttgctgtaaatggccgctttcggttatcaatttgtacatgattagacatgtccggtttgataagaaaaaacgcgtcgtcgacgagctcatccgccgtatcgagggtggggtgatggccgacggtttcctgttgccgggtgagcaccaactggccgaagagtttgcggtcagccgcggcacactgcgcgaagcgttggctgagctcaagcgccgcaactacatcgccacccaaagcggtgtcggctccatcgtcaccttcgatggcatggtgcttgaccagcgcggcggctgggcacaggccctggccgacacgggcgcacgggtcaccaccgatatcctgcgcctggaagcggtcacccgcccggacctgctcagccgtttcggcagcgaccaatttatcgccctcgaccgccgccggcgcacccccgacggcatcgccgtgtccctggaacgctcgctgatgccggcctccggcggcctggaaagcctgcccacagtgggcctgatcgacaattccctgaccatcaccctggccgcctacggttatgtcggcgccgaaggcgatcaatggattggcgccgaacctctcagcgatgaggacgccgagctgctcgggcgccccgccggtacggtttttctcaaagcctcgcgcaccacctacgaccgccgcgagcgcttcatggagcatgtcgaaagcttgctcgaccccctgcactttcgcctgcacctgcagtttggagcttcaaaatgaccccgataacccgcgcactcggcgcgttctacggcctggcgttgggcgatgccctgggcatgcccacccagtcgttgagccgcgagcaggtcagggcgcgcttcggtgccatcaccggcctggaagatgccgacgccgaccagccgattgcgccaaacatgcccgccggttcgatcaccgatgacaccgaacaggcgattttggtgggtgagttgctggtggaaggccaaggcaagatcgagcccaccgtgctcgccaagcgcctgatcgactgggaagcggtgatgcgcgccaagggctcccaggacttgctcggcccgtcgaccaaacgcgccatcgacatgatcctcgccggccacaccccggaagagtccgggcgttatggcaccaccaacggcgcggcgatgcgtatcacgccggtgggcatctcggcggatgtccgcgacccgacgcagtttatccaggcagtggttcaggcctgccaggtcacgcataacaccagcctcggcatttccagtgcggctgcggttgcagcggtggtttcggcaggcatcaacggggtggacctgggcgaagcgctgaacattggcacccagatcgcccagcaggctgaaggccatggccactggatcgccggcggtcggatttccacgcgcatcagttgggcgcgcaccttgagcgtcggcagtggcgacaaagccctgtttgccgacctgctctacgaattgatcggcacctctgttgcctcccaggaatcggtggtggtgtcgttcgccctcgcgcagcaagtggcggtgggcgagatgaatgctttcgaagctctgtgcctggctgccagcctgggcggcgacaccgacaccatcgccgcgatcctgggcgccatgctcggcgcgtgtttgggccttcagtgctggccccaagggctgattgaacaggtcaagcaggtcaatggtttggacttgcagccactggttcaagggttgctcggattgcgctaagcaccgcaaatccaaatgtgggagctggcttgcctgcgatagcggccggtcagttaacaaatcagtgactggaaaaccgctatcgcaggcaagccagctcccacagtaaatcgtgtttgagtcaggacgaccggttaacgctttgattctctgccacaaccacaacaatacaggcatcaggagcacccccatgagtaccccttcttccggccaaagtgccgggcaattggaaacacgcggcatcgaaccggttcctgaaagcgagtgcaacggccatccgttgcaactgttctgggtgtggtttgcggccaatatcagcatcctcggcttgccgctcggcgcgacgctggttgcgtttcgcggcctggccatctggcaggcaatcattgtggcgattctcggtgcggcgggttctttcgcggtggtgggcatcatctccatcgccggccgccgtggccgcgcgccgagcctgacgctgtcccgtgccatcttcggcgtgcgtggcaatatcggcccgaccctcgtgtcgctgatgtctcgcctgggttgggaaaccgtcaacaccaccaccgctgccttcgtgttgctgtcgttgtgttcgatcctgttccactcgccggtcgaagcgaaaagcgcgccgttgctgacgttgatcttcatcgccatttttgtgttgctgaccctgtcggtttccggcctcggtcacgcgaccttgctggtgatccagaagtgggccacctatgtattcggtgccttgaacatcctggtcggcggcttcctctgcgcgaccatcgactggagcgccgtgttcaacgccacacccgcgccgctgagcgcgatgatcatcggcgtcggcaccatggccgccggtaccggtattggctgggccaacgccggcgcggacatgtcgcgctatcagcaccgcagcgtcaaggccgtgcgcctggtggcctccgccgcgtttggtgcgggcattccgctggtgctgctgattaccctcggtggcctgctgtcggtgggcaacaacgacctcgcgtcggccacggacccgatcatcgcaatccgcgacatgctgccgacctggatggcggtgccgtacctgatcaccgcgtttggcgggctgctgctgtcgaacaacctctcggtgtactcggcgggtctcaccaccttgaccctcggtttgaaggtcaagcgcgtgcacgcggtgatcgtcgacatcgtggcgatcttcgccggttcgatctacttcatgctgatcgccgacagtttctacggcccgttcatcaccttcatttccttgctggcggtgcccatcaccgcctgggtcgggatctttgtggtcgacctgattcaccgtcattactacagccccaaagacctgttggacgtgagcccaagcagcgcctactggtatcgcgggggtgtggagtggcgagcgttcggtgcctgggcggtggcgattgtgctggggttcagcttcaccaccattggcaccaccgcgcaaaacatctggttcgccgggccgttgtccgactcctggctgggccacaacggcctgggctggatcgtcaccttcctggtggccggcgggatttatggggtactgggcggcgcggctgaccgtcgcccggctttggtagagcaacacaatgtctagattgctgcacacgggccaggtcatcgtcgacctggtcatggccctcgacaccttgccttcaaccggcggcgacgtgctggccaaatccgccagtttcgaagccggcggtggctttaacgtcatggccgccgcccggcgcaatggtttgccggtggtgtacctcgggcgtcatggcaacgggcgttttggcgacttggcccgcgcggcgatgcaggccgaaggcgtagaaattgcccaagtcgccagcgcgggcaaggacaccggtttgtgcgtgtcgctgaccgaggccagcaccgagcgcacgttcatttcccatatcggcgctgaaggcgacttgagcgctgaagacttggcgagcgtggtgccgtgcgccgacgactacgtgtacgtcagcggctacagcctgttgctggagggcaaggcgcaagcactgctcgactggctgctggcgctgccgcgggaaatcagcgtggtattcgacccggggccgctggtcaaagcaccagactccgcgctgatggttgcgctgctgccgcgcatcgatatctggaccagcaatggcccggaagccctggcgtttaccggcgccagcacgctcgccgaggcactgctcgagctcaatcgccatctgcctgccgagaccctgctggtcgtgcgcgatggcccgaatggctgttgggtcagtcggcagggccaagccgaacatgtgccgggcttcaaggtgcaggcagtggacagcaatggcgcaggcgatgcccatgccggtgtattcctcgccggtttggctgacggcctggaacctgcgcaagccgcgcgcagggccaatgccgctgcggcattggcggtcacccgttggggcccggcgacgtcaccgggcactgacgaagtggacgcattgttggcagaataggcggctactcagcacggagcagccccatgacccagaacatctacgacacaccggccttcttcgagggctacagcaaaatgggccgctcggtcgaagggcttgccggtgcgccggagtggcctgccttgcaggctttgctgccctccatgcgtggtttgaacgtggtggatctgggctgcggctatggctggttcagccgttgggcgcaggagcagggtgctgcccgtgtgctggggctggacgtgtcgcaaaagatgctggcgcgcgccaccgagatgacttccacgcctgccatccactacgccatggccgacctggaacacctcgatctgcctgctgccactttcaatctggcctacagctcgttggccttccattacatcgtcgatctcaaagggctgtttgaacgcatccatcaggccttggtgccgggcgggcgtttggtgttctccattgagcatccgatcttcatggcgccgcgcaatccgggctggctgatagacgagcaggggcgcaaaagctggccagtggatggttatcaacgggaagggcaacgggttacgaactggctggccgacggtgtgatcaaacagcaccgcaccttgggcacgttgctcaatctgttgattcaggcggggtttaccttgagtcacgtggaggagtgggggccgagtgaagcagacctgatcgcccggccggcgctggcagaagagctggagcggccgatgatgttgctggtatcagcccaccgctgattgctgatccaacacagatcaaaaatgtgggagccgggcttgcccgcgatggcggtgtatcagtcaccaaaaatacaggctgatccaccgccatcgcgggcaagcccggctcccacagtgttttgcggtgtatgtgaggactttagctcgcctcaccctccagcttgcgcgcctcatccacacccgacgcggtgagtttgatcggcaaattcaacgagtactcaccggcatcgtcggtggtcacatgcccatccttgataagcccgcgatcctggagaaacgccaagacactggcgaccaccttttcaccgcggtagttatccagcacctccttgcccaagccgttcgggtgggcgtgcagcaggcgggtgaggacttctttctcaaggtttctgtcgacgttcatcgttacctcttcactgggaaatgatcgggtgtaattcatgcaggcgatgaatcaaggcgcaggctgtttaggtgcgccagggatattggagtcatcacccgtattgattttcggccccatttttccattgccgacagcagccggtgcctggcgttgggtatcgttgccttgggtgcgcgggtcggagccggctttgttgtcgatgaccgcgccgccgttggtgtcgaggccggtacccatcgaatcctgggattcctgggtagcagggctgggcgggctgccgacagggtcagtcttgccggtcgacgaggtcgcggcaaaggcgctcagggacgcggcagacagcaggccggtgagggcgagggcggcaaacttggaattcttcatgagggtgtctccatatgattaatgtccttaccctttattggtccgcccccctttgcggttcgtgccttgatggcgacgaacggtatcagctcgcctgtaagattttgtgtgccttgccccggcgatggatcagccgcagcagtgtgatcagccagttgagcagcgccacccccagcaccaccgccagcagcgttggcaggccgtggtcaacgatgagcttgcccgccaacaggggaaacccgaacacacccacaaagtacgccaggctgaacaagagcaaagcctgagacgtggtgccggcgggagcttcattggccaccagcccgttgatcaccgaatacgtcaggccataacccacgcccagggtcaccgccgctaacacatagctgaagcctcccgacacctcaaaggcaaacagccccacggctatcagcatcaaccccgacaacacacacgccgcgccatacgcatcgcgcctgacgacaaagccggcaatcaacaggcggctggtgatcgccgcgctgagaaagcccaggaagaacaacgaataatccagcgaatgcgccgccgcgtagctggtctggaacgatgacaacccaccgaatacgcaaccgcccaggccgaccatcaggatcgcgaacgccgctttggaagacagcacctgacgggtcgccgcccaggaaattcttgccatcggtgcatcggcctgtgccttgaggtgcgcgcccaggcgccagaacatcaccacgccggccaggctggccactgcggcgatgtaaaaggcggtggtcagtggcaaccccagcgcactcgacgcccgcccaagcagcgggcccgagccgataccgctcaacatgctccccgacagcagcgcgaagtggcgggcccggtgccggggttccaccaacatggccacgatgatcggccccaaggtatagaacacaccccagccgagcccgagtgccaggccgaacagcatcaagccttcgccgaaccccggcacccacgcaaagcccaggcaggccaccgcgagcaaaaggccgagtaacgcaatcgagcgcgccgcgcccagccagtccgccaggtgcccagacaccagtaccgccacaaaggtgctcagcatagccatggaaatcacgctgccagcgtcgtgttcattgccgccgcgtgtgtgtatcagcagtgacaacaaaaacgtcgagccgtaagacaaggacagcagaaagctggccaggcaaaacagcacaaacagctttctggaaaacctcgacgcggtgggcatggtgcggacctggcggtaattggatttatggcgccaatatttagcacgcttgcgcctggggtttgttgcccggttacctgcccaagcgttagcccacagcggagtaaagcccctgtgtgcgtggcctccagacgagcggtcaagccgagcgcgttcgttcaaccgccgtacagctgacctttgcgatagtcctgatgcgttgtccgggtcatgcggtatctgtcgctttcaagtcagagctgaagggccccgttcgcctgtaaatgtatcgagtgcgatacgaagtggacacgcggcattacaaacggcgccttagccggacgactccacacagcgaacactgccgccatgactactgtgaccttgctgaaagcccccgtgatcacccgccccagcgaggtgttgtacggccccctccagcccgaattgttgcgtaacgaagtgctggccgacctgctggaggccaccgtgcaacgcgcgccccagcaggtcgcgttgatcgacggcgaacgccagctcacctatggcgagctggaccggcaagccagctgtgtggcctcgcgtttgatcgaggcgggcgtgcgccccgggcagatcgtcgggttgtggatgccgcgcggcctagagctgttggtggcccaggcgggcatcgccaaaaccggtgccgcctggctgccgttggaccacgacaccccgctggagcgcctgcagatttgcatggacgacgcccaggccgttggcgtggtgtgcggcgatgacaacgcccaggcgctgcgtgacgcggggctgaccgcatggtgcgcaagtcaattgctcgcggcattggacggcccggtgcagcgccgtatgaatgccagccccgaagacccggcctacgtcatctacacctccggctccaccggaaaacccaagggcatcctgatttcccagggcagcatctgccatttcctgcgcagtgaaaacgcagtgctcggggtccaggccagcgaccgggtttaccaagggttttcagtcgccttcgacatgtcgttcgaagaaatctggatcgcctatctggtgggcgccaccctgtggatcggccccaaggacatcaccggcgaccccgaagccctgccgcgcatgctcacccaacagcgcatcagcgtgctgcacgcggtgccgaccttgctggcgttgttcagcgaagacgtgcccggcctgcgcctgatcaaccttggcggcgagatgtgccccgagtccttggtcgagcgctggagccgccccggccggcagatgttcaacacctatggccccaccgaagcgaccgtgtcggccagccttgcgcgcctggtacccggcgcgccggtgaccattggcacgccgttgcccaactatggcctgctggtgatcgaggccgacctggcccccggcgccacgcccacgttgctggcgcgcgggcagaccggtgagctgtgcatcatcggccccggcctggccgaaggctatttggggcgacctgacctgacccgtaaaaagttcatcgaaaacccctggtccaccggctactacgacgagcgcctgtaccgcaccggcgacctggcgcgcattgatgccgatggccaggtggtgtgcctggggcgtgcggatgaccaggtgaagatccgtgggtttcgggtggagttgggtgaaatcgaagccttgctcgcccaacagccgggcgtcggcaccgtcgccgtgctgctgcgcaatgacggcggcatggatcaattgattgcgtacctggtgccggaaggcggccagccgatggagggtttgcccgcgcagttgcgcaaggcgttgcaggcgcggttaccggcgtacatggtgcccggccgttttgaatggctcgacagcatgccgcgcctgacctccggcaagatcgaccgcaaagccctcaaggcgcggccactgggtgtggacacccgcggcgcgagcctggagtcggacacgccggaaaaccccgctgaaagcgtactgttcagcgccctggaaaaactcttccccggccagccgatccggcgtgacgcggacttcttctgcgacctgggtggccattctttctttgctgcgcgcctggcctcggccttgcgtgcggatgagcgtttcacccacatcaccgtacgcgatatctaccagcagcgccgcgtcggcgccatcgccgaggtgctgcaaaccgcgccgcaaccggcggtgcaagaagccgcctggacaccgccgtcagccttggcgcgctggcgttgcgggctggcccaggcggcggtgatgcccgccatggtgtgcctgcgcatgagccagtggctggcgccgtttttcacctaccactacctcaccggcggccccggcgactcgatggcaatcgcaaccgtggcgtcgattggcgtgtttctgttggcgaccctgatgcagttcttgctggccatcgctggcaagtggctgatcgccgggcgtttgaagccgggcgtctatccgctgtggggcttcacctattttcgttggtgggcggcttcgcgcatggtcgagtcggcgccggtctatctgttgagcggctcctccttgtacggcctgtggctgcgtgcactgggtgccagggtcgggcgcgaagtgaacatcggctcgctgggcgtgcgcgtgccggacctgctgcacatcggcaatgaagtcagtatcggcaacggcgtgagcctggaaaacgcccgggtcgagcgcggccacttgcacttgggccgggtctcgattgatgacaacgcttgcctcggttcctacacgattctggaaggcaataccgccgtcggccgtagcggccacctgcaagggcaatccgccttggccgatgggcgcagtgtgccggctgaacgtatctggagtggctcgccggcggtggatgtcggcgcatttgacccggccagtttgccgcctcggccggtggtcgggcgtgggcaactggcgctggagaacgcattttatgtggcgggcattctgctgattgccacgttgtttttcatgccggtgttcccgacgtttttcctgatcgactggtttgacgagcagcacatcctgccgtggctgcaggagcaacacgtgagcctgcaactgctgcgttacttcgccttggcattgcccgcagcggcggtattgatcgtgatgatgatgctggtatctgccggcctgcgctgggccgtgctgccacgcctgaaaccgggcaactacccggtgcacagccgtgtgtattgcagcaaatggctggtgagccatatccaggaagccagcctcaatgtgctgtcgggcctgtatgccacggtgtatgcgccgctctggtatcgcctgctgggcgcgcgcgtgggccgtgatgcggaaatttccacggcccagggtgtgatccccgacatgctgaccctaggcgacgaaacctttatcgccgatgccgtgatgctcggcgatgagcaggtggacggcggctggatgcgtattcagccgaccgtggtctcgcaccgcagttttgtcggcaacggcagctacattcccgacggcaccaccttgcccgaaaacgtgctgatcggcgtgcattcccgggcgccggccaacgctgaaatcgccagcggcgatacctggctgggctcgccgccgatcaacctgccggcgcgcgagcaggtcagcggttatcccgaccacctgaccttccggccatcgctgtggcgtcgcctggcccgtggcgccattgaaggcctgcgcatcgtgctgccccacgccacggtgatcgccgtgggctacacggtgatgatggatttgatgccggtggccgaagaagaacgttggggcgcggtgctgggttacctggcgctgatcggcctggcctacagcctgggtaactatctgttggtggcggcgttgaagtggctggcaatggggcgttatcgcaagcgttccgaggcgatgtggacgccgtttgtgtggctgtccgaaggcattaccagcctctacgaaggcatggccgcgcccaacttcatgagctatttacgcggcacgccgtggctgccgttggcctttcgcggcctgggctgcaagatcgggcgcggggtgtacatggacactaccgacatcactgaattcgattgcgtgaccatcggcgaccacagcgaattgaacgccggtgcctgcccgcagacgcatttgtttgaagaccgcgtgatgaaaatcgaccaggtgctgatcggcgagcgggtctacatggggccgcgcagttcggtgctgtacagcgccgaagtcggcaatggcgcgcggctcggcccgctgaccctggtgatgaaaggcgaatgcatccccgcgtcgagcagttgggtcggctgcccggcggcaccggcgcgaggctgagcagcatgcaagtattgatgtggcctcaggcgcgcccgcgtttacaggacggcgtattgctgatcggcgtgcagcacgcgccgggcagcacgcgcgacatggcccgcgcgcacgtgcggcgggcgctgagccaggccttgcagcagatgctcgatgtaccgcctgcgcgcattggcatccactcggtgccgggccagcccccgcagattcgtgtgccgggtcatgaggacgccgggctttcgatcagccacgatggcgatttttcggtggccgccgtgcacctgcacggcccggtcggcatcgacgtgatgggcgtgcaggacacgcctgattggcgcggcgtcgccagtgattacctgggtccgcaggtgctggcgcggttgtgcgccgcgacccaagcgcagcgtgcccgcttgttcacccgtgcgtggtgcgagcgcgaggcgcgcctcaagtgcgtggggcaggcgctgggcgaatggtcgccgcgtgtggcgcggggttgccgcaccgttgaggtgggcctgccggcggggcgggtcggcgccttggcgctgcgcgcgtaaattgcgctgcaatcggtcatgaaagcgccttagtatgtgggctttgacattgcccaaggcccgcccatgaccatcgagattcgccccgcagtgcccagcgatgctgcgcagatcctgaccttcatcaccgaactggccgagtacgaaaaggcccgacacgaagtgatcgccagcgtggtggacatcgagcgcagtctgttcagcgagggcgccaccgcccacggcctgatctgctcgcgggacggtttgccgatcggtttcgcggtgttctttttcagctattcaacctggctcggcagcaactgcctgtacctcgaagacctctacatcaaccccgagcaacgcggcggaggggcgggcaagaagttgctgcgccacctggccaagatcgcttgcgacaatggctgcgggcgtttcgagtggagcgtgctggactggaacgaaccggcgattgccttctacaagtccatcggcgcccagccgcaggaagagtgggtgcgctatcgcatggaaggtaatgccctgcgcgattttgccgagggctgaaccccccaatacccactgtgggagcaggcttgtgtgggagctggcttgcctgcgatagcatcacctcggtgcaactgaaataccgaggcgctgccatcgcaggcaagccagctcccacacaagcctgctcccacatttttttgtgatttgttcactatatgggatgcaaatttatatattgagatatttcaaatgatgggtttatagtcgcctgcatcagcactcactaccaaaaataaaacaggtgaagcgatgcaggcccaaccgttgtcattacccgccgtgcccgagccgacttacggcgagcggctgaagaacaaagtggtcatcatcaccggcgcagcccaaggcattggcgaggcaattgtcgcgtgcttccaggcccagcaggcgcgcctggtgatcgccgatatccagggcgaaaaagtcgaaaaagtcgccgcccactggcgcgagcgcggtgccgagattgtcgcgcaacccgtcgatatcacctccaaagagcaatggcaggcgctggtcaatgtggccatcgagcgctttggtcgtgtggacgtgttgatcaactgcgccggggtcaatgtgttccgcgacccgctggaaatgaccgacgatgactggcgccgctgctttgccatcgacctcgacggcgcctggttcggttgccgctcggtgctgccgcacatgatcgagcagggcattggcaacatcatcaacattgcgtccacccattccagccacatcattcccggctgttttccgtatcccgtggccaagcatggcttgctcgggctgacccgcgcccttggcattgaatacgcgcccaagggtattcgggtgaatgccatcgcgccgggctacatcgaaacccagctcaacgtcgactactggaacggtttccccgacccccacgccgagcgccagcgcgccttcgacctgcacccgcccaagcgcatcggccagccgattgaggtggcgatgacggcgttgttcctcgccaccgatgaagccccttttatcaatgcaacctgcctgatgatcgatggcgggcgttctgtgatgtaccacgactaatccaataagagaggtgccccatgttcgtcaaaaacaggttcaagaagactctaggcgctgtggcactggctgttgcctttagcggctttgcatctgccgaagaagtgaagatcggtttcctggtcaaacaggccgaagagccctggtttcagaccgaatgggccttcgccgaaaaagccggcaaggaccagggtttcaccgtgatcaagattgccgtgcctgacggcgagaagaccctttcggccatcgacaccctcgccgcgaacggcgccaagggctttgtgatttgcccgccggacgtgtccctcggcccggccatcatggccaaggccaagctcaacggcttgaaagtactggcagtggatgaccgtttcgtcgacgccaaaggcaagcccatggaagacgtgccttacgtcggcctggacgcctacaagattggccagaaacaaggcgaagccatggccgccgaagccaagcatcgcaactgggactggaaagaaacctacgccgtcatcaacacttttgacgagctggagaccggcaagaaacgcaccgacggttcggtagaaggcctcaaggccgctggcctgccggctgaccacatcctgttcagcgcacagaaaaccctcgacgtgccgggcagtatggactcgaccaactcggcgctggtgaaactgccgggcactgcgaaaaacctgatcatcggcggcatgaacgacagcaccgtgctgggcggcgtgcgggccaccgaaagtgccggcttcaaggcggccaatgtgattggcgtcggcatcaacggcaccgatgcgattgaagaactgaaaaaatccgacaccggtttctacggttcgatgctgctgagcccggatgcttccggctacaaaaccgccagcgcgatgttcgaatgggtcaccaaaggcactgagcctgccaagttcaccgccctggacaacgtgaccctgatcactcgcgccaacttcaaggaagagttgagcaaaatcggtctgtggaaatgaccggcgcggccctgcgtttcaacggcatcggcaaggagtttcccggggtcaaggccttggcgcagatcagctttgaagcgcggccgcaccaggttcacgcgctgatgggcgagaacggcgcgggcaaatccacgctgttgaaaatcctcggcggtgcctatcagccgagcagcggcacgctgcagatcggcgagcagaccatggccttcaagaacgccgccgacagcatcgccagcggcgtggcggtgatccaccaggaactgcacttggtgccggaaatgacggtggccgagaacctgtttctcgggcatttgccgacgcgttttggtgtggtcaaccgcagtcaattgcgccggcaggcactggcttgcctgaaggggctggccgatgaaatcgacccgggggaaaagcttgggcgtttgtccctgggccagcgccaactggtggaaatcgccaaggcgttgtcccgtggcgcccatgtgattgcctttgacgagccgaccagcagcctgtcggcgcgggagattgaccggctgatggcgatcatcacgcgcctgcgcgacgagggcaaagtggtgctgtacgtgtcgcaccgcatggaagaagtgttccgtatctgcaatgcggtcacggtgttcaaggacggccgttacgtgcgcacctttgatgacatggccgcgctgacccacgaccagttggtgacgtgcatggtcggccgcgatattcaggacatttacgattaccgcccgcgtgagcggggcgaggtggcgttgaaagtcgagggtctgctcgggccgggcctgcgtgaagcggtcagccttgaggtgcacaaaggcgagatcctcggcctgttcgggctggtgggggccgggcgcaccgagctgttccggctgctcagcggattgacgcgttcaaccgccggccacctgcaactcggtggtgaacacctggcgctgcgctcgccgcgcgatgctatcgccgccggtatcttgctctgcccggaggaccgtaaaaaggaaggcatcatcccgctgtccagcgtcgccgagaacatcaatatcagtgcgcgcggcgcccatgccacctttggctggctggtgcgtgacggctgggagaaggacaacgccgaccggcagatcaaggcgatgaaagtcaaaacgccgaacgccgagcagaaaatcatgtacctgtccggtggcaaccagcagaaggcgatcctggggcgctggctgtcgatgccgatgaaggtgttgttactcgacgagcccacgcgcggcatcgacatcggcgccaagtcggagatctaccagatcatccataacctggccgccagcggcattgcggtgatcgtggtgtccagcgacctgatggaagtgatgggtatttccgaccgcattctggtgatgagcgaaggcgccctgaccggcgaattgaaccgcgaccaggcggatgaagcacggctgttgcaactggctctcccgcgttcgcgggcttgaagaattcgagggtatgggtatgtcacaggtaaaaacggcaaagggcttctggcccggtttcaaccagcgcaaattcctcgatgactgggtgatgctgctcgctgcgttgactatttttgtgctcagcgcgctgttcatcgacaacttcctttcgccgctgaacatgcgcggcctgggcctggcgatttccacggtgggcattgccgcgtgcaccatgttgttctgcctggcgtcggggcatttcgacttgtcggtcggctcggtgatcgcctgcgccggggtggtggcgggcattgtgatccgcgacaccgacagcgtggtgctgggcgtgtcggcggcgctggccatggggctggtggtgggtttgatcaacggcatcgtcattgccaagttgcgcatcaacgcgttgatcgcgacgctggcgaccatgcagatcgtgcgcgggctggcctatatcttttccaacggcaaggctgtcggggtgatggacgaaggcttctttgtgttcggcaacggccaactgatgggcgtgccggtgccgatcatcatcaccgtgctgtgctttgtgttcttcggttggttgctcaactacaccacctatgggcgcaacaccatggccattggcggcaaccaggaagcggcgttgctggccggggtgaacgttgatcgcaccaaaatcatcatcttcgccgtgcatggcttgatcggtgcattggccggggtgatcctcgcctcacgcatgacttcgggccagccaatgatcgggcaggggtttgagctgacggtgatttcggcctgtgtgctgggtggggtttcattgagcggcgggatcggcatgatccgccatgtgatcgccggggtactgattctggcgatcatcgagaacgcgatgaacctgaagaacatcgacacgttttaccagtacgtgattcgcggctcgatcctgttgctggccgtcatcatcgaccgtatgaaacagcgttgaagcccgaacctatgaagatctaaatgtggtagctggcttgcctgcgatagcggtgtatcagccagcaaatttattggctgatcctccctcatcgcaggcaagccagctcccacagtggatctccactgttttgagggacggcatttgccataatggcgccgttttcgtactttccaataggcccgatatgcaggaaaacgctcagctccccgccaaagacgccgcccccaccggcacccagaccctgctgcgtggcttgggcgtggtgcaagcggtggcggccggtgcgcgcgatttgaaagagatcgccaagcgcatcggcaccacccgcagcaccacccaccgcctggccagttgcttggtggaagaacgttacctgcgtgtggtgccacaagtcggttacctgttggggccgaagctgattgagctgggtttccaggcgcgtgaagaactgccgttggtgacccttgccattccgtatctggatgagctctcggcgttgaccggcgacaccattcacctggccattcgcgaatacgacgacgtgctctacctgcacaagaaccccgggcgcaacggcccggagatgcgctcgcgggtcggccaccgcatgccgctggcgcgcacgggcatcggcaaggccttgctgctggatgattcggttgcggagtggcagcgcctgtacgacgtcagcctgccggcaggcggcaaaagcctgcagtggccgcagcacccggagcagtcctgggcgcagttcgagcagcgcatgcacgagtatgtggcggggggctatgcgttcgatctggaagacaacgaaccgtcgatccgttgtgtggcggcaccggtgcgcgatgccggccggcgcattgtcgccggcatcagcatcgccagtaccgtgccctacatgccgctggaaaagatggccgagctgatccctgtgatcaaacaggtcgcagcgcggctgtcagcggagttgggcgcgaaggcctgatcaggccttcagggtcgccatgtcgatgacaaagcggtacttcacatcaccggcgatcatgcggctgtaggcttcgttgatgttgcggatatcgagcatttcaatgtcgcagctgatgccgtgctcggcgcagaaatccagaacttcctgggtttcggcaataccgccgatcaaggagccggccagcactttacggcccatgatcagcttggcggcgttcaccggcgggtctaccggctcgatcaggccgaccagaatgtgcacaccgtcaaagcgcagcacgtcgaggtaggggttcaggtcgtgctgcaccggaatggtgtcgagcaagaagtcgaaatgcccggcggcggctttcatttgctcggcgtcggtggacacgatcacgtgatccgcaccttggcgacggccttcctcggccttgctcgccgaacgtgtgaacagggtcacttcagcgcctatcgccttggccagcttgatgcccatatggcccaggccgcccatgcccaatacaccgaccttgtcgccagccttgatgccgtagtgcttgatcggcgagtacatggtgacgccggcacacaggatcggcgcggcgctggccaggtcgagtttggccgggatcttcaccacaaagtgctcgctgaccacgatgctgtcggagtagccgcccatggtgttgctgccgtcaacccggtccggggtggcgtaagtcatggtcgggccttcgaggcagtattgctcaaggtctgcatggcaggcgtcgcagtggcggcacgaatccaccatgcagcccacgccgaccaggtcgccgactttgtgcgaggtgacgctggcgccgacggcggtgactttgccgacgatttcgtggcccggcatcaacgggtacacggcaatgccccattcgttgcgtgcctggtggatgtcggaatggcacacgccgcagtagagaatctcgatggccacgtcatcggcgcgcgggctgcggcgttcaaacgacatgggggcgaggggagtggtggccgactgggcggcataaccgatggcggtatacatgggaaaaacctcgcaaagcaatcacaggggaggcggcgcattctgcgcgccgaccctgggggcgaacatggcgattgctccgaacctcatgcctattcgtccgggagtgccctgtgtttggatccatgtggacccagacctgcgatgatgctcacatcccctttttcgcgaagtttttgccatgttgttgacccgccatctcgacgccaacgcgacgctggtttccttgattgaaggcctgacgccctgcgacggtttctccccgacaaacctgccgggcgtgaaggtattgcgcgccagttgcgacgtggcgcgcggcccgcagatctatgagccgagcctgatgttcgtcgcccagggcagcaaagtggcgtacctcggcccgcgtacactggagtatggggccgggcattacctgattcaggcgatgccggtgccgttcgaatgcgagacttttgccatggcgccggatgcaccgttgtacggcgtgacggtaggcattgaccgggtgatgctcggtgaattggtgatggccatgggcattcaggccgggccgccgccgaccgcacagaccctggagtcgatgagttcggtggtgctcgatgatgccatgcgcggctgtgtcgaacggctgctggagtgcctgcacgatccgctggaaagccggatcatgggcccggcgcgggtgcgcgaattattgttcaccgccttgcgcggtccccaggcggatgtgctgcgcgcattggtggaacagcagggtcagttctcgaggatcgccacgtcgttgaatcacctgcacgcgcatttccatgagccgctgaacatcgagacgctggccggttatgcgcatatgagcgcgtcgacgtttcatgagcatttcaagcgctgcaccttgttgtcgccggtgcagtacctcaagcgcttgcgcttgctcaaggcccagcaattgctgctggtggagggtatgggcgtggcgcaggcggcgcacaacgtggggtaccagagtacgtcgcagttcagccgggaatacaaacgctactttttgcgcagccccggtgaagagcgggcggcctagtaataacgtcgcgggtcggattcgatcaggctggccagtttggtcagggcaaaacgcaattcgtcctggctggtgggtgacatcagcaccagccgcacgctgcgtgtcaccccggaacgttcggcctggaactgcgtgccactgagtaccagcacgccattggcccgcgccagcatggtgaattcgtcgctggtccacggctccggcagcgtcagccagacatggtaggaatacggttgggtcttgagttcaaagtcggcaaagatctcctgggcaatcgcttggcgcccggcggcttcgttgcgctggatacggatcagtttcttgtccaggccttcggtgatgacgttgctggccaattgcgcggtcagcggcgacggcatccagacgctgctgcgcaccatcgaggtcaggcgcgagagcaattttggcgggctgtagagatagccgatgcgcagcgcaggcatgaccgacttggacaggctggtcaggtacaccgagcggtccggggcaaacgccgacaggggtttgattgacgggtcggtggccaggaagccatagatgtcatcgtcgagaatgatgaagtcgaactcttcggccagcgccgcgatttgcgcccggcgcctttgcgacatgattgccgccgtcgggttctggcaggtcgccacacacaccagcatcgccggtttttcccgctggcacagctcgcgcagtgcctcgggaatgatgccttcatcgtccatcggcacgccacgcaggcggcgttcaaggccatgggccagggaaatgatgccgggatagcaaagctcttcgcagagcaccaagtcaccggcgtttgtcagggcgctcatggcgaccatcaggccatgttgtgcaccggcggtgatgatcacttgctgccattgggcgtcgggcaacgaatggcgcagccactgcgcgccggcctcgcgatgtgccgggtgcccgccgtctggcgcgtaatccagggcgcgggcgaaatcggtgctcttggccaggcccacaagtgcatcgcgcagccagtattcgagggtttcgctgtagggcttgatgatcgacaggtcgagcagttcggactgccccaggttcaacggtgcggcgccgttgctcgccggcagctccagctgcttttggttgagcacatacgtcccgcgccccacttccccctgcaccagccgacggcgatgggcttcgctgtacgcgcggctgatggtgcccggcgtgacattcagcgtggtggccagctcccgcagcgtcggaagacgatcaccttcgttcagcacgccgttattgatatcgcgcgccaacgcatcggcaatcgacaaatacatcggctggctgaactcgcttagctggggaacccacatgaatgatcactgcccatcgtagaaatgatgaatatccgagcatatcacagggaggttagacaactgataaatcgacttaatctgattattgagtcgattgaagtggtgattgagtcgagagtcgccagaaaatacagatattttttaaagaaataatactgataataatcaaatgcttattaacctaatagcctgtaattcaggactgatatcaaaaaaacatctcgtaacaaccttggcgcctattgaatcaactcaatttattcaaatacactcgtctcgaatcgaatcaatcgactcaatccatcccctgatcactgcgcgactcctgcgcgccaagtcgagacatcatggacacactcagaaaggatctatccctgtcagccgtcatcgcgggctttatcgccgtgatcatttcgtatgccggccctttgatcatcgtgtttcaggcggccagggaagcgcacctgccagacgacgtggtgtcctcctggatctgggcgatttccatcggcagcggtatgactggtctgttcctgagctggcgcctgcgggttccggtcatcaccgcgtggtcgacgccgggggcggcattgctggtatcgatgctgcccacggtcaccctgccgcaggccatcggtgcgtatgtggtggcatcggtgattatcgccatcgtcggtttgtcgggcgcgttcgacaaactcatgagtcgcctgcccaaagccatcgccgccgccatgctcgcgggcatcctgtttcgctttggcgccgaactgtttacgtctatcaagctgcaaccggcgctggtgctgtcgatgatcgcggcttatttgatcttcaaacgcttttcgccgcgctacgccatattgtcggtgctgattatcggctgtgccgtggccgcctcgtttggcgagctgaacagcggtgcaatcacgattgccgtggcccatccggtgtttattgcgccgcaatggagctggcacgcaatcatcaatatcggcctgccgctggcgctggtcaccctgaccggtcagtacgtgccaggtatggcagtgttgcgcacttcgggttacaccaccccggcgcgttcgatcatttcggtcacggcgatcggctcgattctgatggcgccgttcggctcccacggcttcaacctggcagcgatcaccgcagctatctgcaccggccgtgaagcccatgaaaaccgcgataaacgctacatcgccgggatcgcttgcggggtgttctacatcctgatgggcacctttggcgcgaccctggcctcggtgttctctgcactgcccaaagagttgattgcctcactggctggcttggccttgttcggtgcaatcagcgccgggctcaccggcgccatggcggatgagaaacaacgcgaagcggcattgattaccttcctggtgacggcctcgggcatgagcttcctcgggttggcggcagcgttctggggcttgattttcggcctggtggcgcacggtgtgttgacctacacccgggaaagcaaaaccgccgctctgcccgaaggcagccggtcatgagtgcttgttacgacttcatcgtggtgggaggcggcatcgcaggcgtgtcggcggcgtatgagctggcggcccacggcagcgtttgcctgctcgaacaggagcagcaactggcctatcacaccacaggccgctcggcggcaatctccatggaaagctacggaaaccagcagattcgctcgctgacctgtgcgtcccgggggttcttcgaaaacccgccagaaggcctggccgaacatccgctgtggtcgcctcgaggggcgctgatcgtggcgcaggcggcccgggtggaaaagctgaaaacgcgtttcgacgcggtgcttgagcaggtgccaaccgccaggttcctcgacgacaagcaagtgctcgagctggtgccttatttggccgaaggcgcctggagcgccgggatctacgagcccagcgcgttcgatctggatgtgcacggcatccacagcgcctacctcggcggattgcgggtgcgtggcggtgtggtcaagcgtgaggccgaggtggtgcgcggcgagcgtcgcaatggtttctgggccttgcacaccgctgacggccagcggctggaggcggcagttgtggtcaacgctgccggtgcctgggctgacgaactggccgagcgctgcggtgtagccagggttggtgtacggccgctgcgccgcaccgtgctggcggttgacccacactgcgacgtgcatcacacgccttacctgggcaccgtcgacgaagatattttcatcaagccggaagccgggcgcctgatcgtttcaccctgtgatgaaagcctctcgctgccgtgcgatgcgttgccggaagagctggatctggccatcaccatggaccgtctgcaaagcaccacgcgcctgcgcccacgctcgatcatcagcaagtgggcgggcctgcgtaccttcgtcgccgaccgctccccggtgctcggccaggacccgcagcaagaaagctttatctggctggccgctctcggtggctatggcattcaagctgcgcccgccattgcccggctgtgcagccatgcggcgctgggcattgccatgccttctgacctggcggcgctgaaactcaattaccagcatttttccgcgtcccgctgccgtaacgaggaattttcgagcctggccgtcaagcaggttgccgatttgcactaacccacaccccaacaaggaacgtcaccatgcacaccaccgctcaactcaagactgccgcccaacctttcctcggcgaagacaacgtgattttcaccgacaaggcgccgctgcccctgggcacctattcccaaggcatcaaggtcagtcacgggcagaccatttacctgtcggcgcaaaccccggtttcggtgctgaacaatgaagtgctggcgacggattttgaaggccagttgcgtcagaccctcgacaacctggtgcagatggccgaggcagcgggcggcaccctggcgaacgtggtcaaggtgacggcgttcatcactgacttgagcgagttcccgaccctcaaccgcgtcatggaggagtacttcacccagccgtaccccgcgcgcaccacggccggtgccagcgccctggcacgcaatacccaggtggccatcgacgccatcatggtggtctgaagaccctctgtcagcacggtgcccgtcggtctgccccatggaccgacgtcggcagggaatgcaccagcaaacgtactttcagggggttggccgtgaagaattcgtacagagagtatgtgttgcagtgcctggcctgcgatcgcagttaccagccgcacgaggtcagttactactgcccgcattgcaaggtcgagggtgcccttgacgcgctttacgattacccgacgctcaagcgcgaatggtccagggacagcctggctcacgatcatgcccgtggcatgtggcgctatgaccggctgatgccattgagttcgacccagttcatcccgcccttgctcgtgggcaacacgccgctgtattcgcgcccggaactgctcggcaaaggcgcgcggatcaaagtctttatcaaggatgaatcccgccagcctaccggctcgctgaaagatcgcgccagcgccctggcggtggcccacgcgatgcaaaccggtgcgcgcacggtggccgtggccagcaccggcaacgccgcttcggcgctcgccgggatgagtgccagcctgggcctgcgcaatgtgatttacctgcccaaaagcgcgccccgcgaaaagctcgcgcagatgcaaggctacggtgccgagattgtgctggtggatggtcaatacgacgaggccttcgagcaatgcctcaatgcctgcgaaacccatggttggtacaaccgcaccaccgggattaattcgtacatgagcgaaggcaagaaaaccgtggcgttcgagatgtgcgaacagctcaattggcaggtgcccgacctggtgttcgtgccggtcggtaatggttgcattctcggctcggtctacaagggtttcttcgacctgctgcagttgggctggattgagcgtataccgcgcctgatcggagtgcaggccgaacacagcaactttatgtaccgggcctggcgcagtgaccggcccatgcagcagatagagcgcattgcccccaccagcctggccagcagcatcaatgtggcgttgccgcgtgatcgtcttaaagccatgcgcgcagtgaccgccagcggcggcgaattcatctgcgtcagcgacccgagcatcgtcgccgccgcttccaggctggcggccaacaccggtgtgtttcccgaagccggtgccgccagcgcgtttgccggcctgctcaaatacgccgaacagcaccccgataccgcgcaaaccgctgtgatcctgatcaccggcagcggcttgaaagacacttccatttttctatccgactcggtcagaaaccagccacgggtgcagtcgcatcacgtacctgcaccgctggccgaagcgcttacctgaggaatcagaccatgagcctgcaaaatttcgaccctgccgttgcccgcctgatcgaccgtgagcacaaccgtcaggagacacacctggagctgatcgcatcagaaaactacgtcagtgatgaagtgcttcaggcccagggctcggtgctcaccaacaaatacgccgagggctatccgggcaggcgctattacgggggctgcaacgttgtcgacgagatcgaaaacctggccatcgagcgtgcccgcgcactgttcggctgcgagtacgtcaacgtgcagccgcactcggggtcccaggctaaccaggcggtgttcctggcggtgctggagccgggcgacactattttggggatgtccctggcccatggcggccacttgacgcatggcgcctcggtgaacctgtccggcaagctctaccgggccttttcctatgggctggagcgcgacaccgagaccctcgactacgccgaaatggaagccctggcccgggaacacaagccgaagctgatcatcgccggggcctctgcctattcgcgcaccatcgacttccagcgttttcgcaacatctgcgatgaagtcggcgcttacttgatggtggacatggcgcactacgccggtttgatcgcggcgggactgtatccatcgccggtcggcattgccgatttcgtcacctctaccacccacaaaaccctgcgcggcccgcgaggtggcttgatcctggccaaagcgcaatacgcggcgctgctcgacaagaccattttcccggtttaccagggcgggccgctgatgcatgtgattgcggccaaagccgtggcgttcaacgaagcgctgagcgacgggttcaggcactaccagcaacgggtgatcgacaatgcgcgcaccatggcaggcattctcgctcgccggggtttgcgcgtggtgtctggcggcactgattgccatatgttcctgctcgatctgcgctcgatgaacatcaccggcaaagatgccgaggcgttgctggagagcgcccacatcacgctgaacaagaatgcgattcctgatgacccgcagaagccggcgatcaccagcggcattcgtatcggcaccccggcgctgaccactcggggttttggcgaagcagaaagcgccgaagtggcgaacctgattgccgacctgttggagcagccgaacaacgccacactgctggaaagtacccggcgtcgggtgatgcacttgtgtgagtgttttccggtctacctgctgagctgaggccaaaaaaaaaccaacgccgcaaggcgttggtttttttttgtggcctgacttacatgttcgggtaagtcggcccgcctgcgccttccggcgtgacccacgtaatgttctgcgaagggtccttgatgtcacaggtcttgcagtgcacgcagttctgggcgttgatctggaagcgcttctcgccgtcttcctgggtgatcacttcatacacgccggccgggcagtagcgctgcgccggttcatcgtagagcggcaggttggtgccgatcgggatgctcgggtctttgagcttcaggtggcacggctgttcttcttcatggttggtaccggagatgaacaccgagctcagcttgtcgaagctcagcttgccgtcgggtttcgggtagtcgatcttcttgctgtctttggccagcttgaggcaggcgtagtccggcttggtgtcgtgcagggtgaacggcatcttgccgcccaggatgttctggtcgaaccagttgaagccggcgccgaggatcgggccgaacttgtgcatcgccgggccgaagttgcggctggcgaagagttcttcgtagagccagctggacttgaagctgtcgacgtaggtggtcagttcatcaccgccttcagattcggcgaacaggcggtcggccacggcgtcggcggcgagcatgccggacttcattgcagtgtggctgcccttgatcttggcgaagttcagggtgccgaggtcgcaaccgatcagtgcgccgcccttgaacaccatcttcggcagcgagttcaggccgcctttgcagatggcgcgggcgccatagctgatgcgcttgccgccttccaggtactgggccagcaccgggtggtgcttgaggcgctggaactcatcgaatggcgacaggaaggtgttgctgtaggacaggtcgacgatcagaccaaccactacctggttgttttccagatgatagaggaacgagccgccggtgttctcggcgctcatgatgtccagcggccaaccggcggtgtggacgaccaggccaggttggtgcttggcggggtcgatttcccagatttctttcaggccgatgccgtagtgctgggcgtcggcgtcgctgtccaggttgaagcgctggatcagttgcttgccgatgtggccacggcaaccctcggcgaacagcgtgtatttgccacgcagttccatgcccggggtgtacacgccttctttcggatggccttcgcggtcaacgccaaggtcgccagtgatgatcccgcgcaccacaccattctcgtcgaacagcgcttcctgggcggcgaagcccgggtagacttcaacgcccaggttctcggcctgctgggccagccaacggcacaggttgcccagggaaatgatgtagttgccttcgttgtgcatggtcttgggcacaaagaagtcaggcaccttggtggaggcttcggggctgcgcagtacatagatgtcgtcacgcactacgggggtgttgagcggggcgccgagtgctttccagtccgggaacagttcgttcagggcgcgtggttcaaacacggcaccggagaggatatgcgcgccgacttcggagcctttctcgaccacgcagacgctgatttccttaccggcttcggcggccttctgcttcagtcggcaggcggcagacaggcccgccgggccagcgccgacgatgaccacgtcgaattccatgtattcgcgttccacaggctatctcctactcaaggctcaacaggcttttttttctaatgggtggaggttcggtgctgtctcgcaacaacggcaagacccacctttctctctaggtggcgcattatatctacaccactgccagcgtccaatacaaacgtttgtttgaattgcccgcaggctaggtaaatcaaagacacgcggcttatgactggctattttggcgtattgaccagaataggcgttccggtcaatatacggtcggttttgcgctaaccgtaggcagactgcaggtttcaagagcacgtccaaaagcaagacaggtgacgcgcgcccaaacgatggcgcgcagtttacacgctgcgataaagaatgacctctcagtcacccctgacgaacggtcatcatttcccgtgagcaaggtcacacgccgaggtttttggaggtgcccttgtgtgccgatgagcatcaaccgccaggttcgcctaggcgactttcttttcaccggagagtaacgaggaatccatgaaggttcttgtagctgtcaaacgcgttgtcgattacaacgtgaaagttcgcgtcaaggcggacaattccggcgtcgaccttgctaacgtcaaaatgtcgatgaaccctttctgcgaaatcgctgtggaagaagccgtccgcctgaaagagaaaggcgtggcgactgaaatcgtcgtggtttccatcggccctaccactgctcaagagcagctgcgtaccgccctggccctgggtgctgaccgcgccatcctggttgaatccgctgaagagctgacctccctggccgtggccaagctgctcaaagccgttgtcgacaaggaacagcctcagctggtgatcctcggcaaacaggccatcgacagcgacaacaaccagactggccaaatgctggctgcgctgaccggttacggccagggcaccttcgcctccaaggttgaagtgagcggcgacagcgttgccgtcacccgtgaaatcgacggcggcgcacagaccgtttccctgaaactgccggccatcgttaccaccgacctgcgtttgaacgagccgcgctacgcgtccctgccaaacatcatgaaagccaagaagaagccgcttgagtcggtcactcctgaagctttgggcgtttccaccgcctccaccaacaagaccgtcaaggttgaagctccggctgcacgcagcgcgggtatcaaggtcaagtcggtggctgaactggtcgagaaactgaaaaacgaagcgaaggtgatctaatcatgactatcctcgtaatcgccgagcacgataacaaggcgctggctccggccacgctgaacaccgtagccgctgccgctaaaatcggtggcgacattcacgtattggtagcaggtcagggcgctggcgccgtggctgaagccgctgcaaaaatcgcgggcgtgagcaaagtcctgaacgctgataatgcggcttacgcgcaccagctgccggaaaacgttgctccgctggtagctgagctgggcaagggctacagccacatcctggctgccgccacgtccaacggcaaaaacatcctgccacgcgttgccgcgcagctggacgttgaccagatctccgagatcatctcggtagaaagcgctgacacgttcaagcgtccgatctacgccggtaacgccatcgccaccgtgcaatcgaccgccgcgatcaaagtgatcaccgtacgtgccaccggtttcgacccggtagctgctgaaggtggctcggctgccgttgaagccgttgccgctgcccacgacgctggcacttccagctttgttggcgaagagctggccaagtcggaccgtcctgagctgaccgctgccaagatcgtcgtttccggcggccgtggcatgcagaacggtgacaacttcaaacacctgtacgccctggctgacaagctgggtgctgcggtgggtgcttcccgcgctgccgttgacgcaggtttcgtacccaacgacatgcaggtcggccagaccggcaagatcgttgcgccacagctgtacatcgccgtcggtatctccggcgcgatccagcacttggccggtatgaaagactccaaagtgatcgtcgcgatcaacaaagacgaagaagcaccgatcttccaggtagccgattacggtctggtggcggacttgttcgaagccgtacctgagctggagaagctggtctaatccagccgcttcacttataaagagcccggtccctgtgaccgggttttttttgctgcttttttggacaccggagaatttcgccatggaactgcgcccctgggccgtactattgggcctcacgttgctgccaggcctgacgctggccgccggcaaatgtgatcgcctggtgatcaccggcagcccggacgcaccgcccttgctgtggcgtgacccgcaagacccgacgcacctgatcggcgccactgccgacgtgctgcaacaagtgggcaaagacctcggcttgaaaatcgacttgctctacggcggcaaacgttccctggccctggaagaagtacgcagcgggcgcatggacatcctcgctgatgcgccgctgaacctgggcgaactggaaaccctggactacatccacccggcgctgacgcagatcgactatctggtctggacccgcaaggattcgccgctggcctataccacggccgccgacctgcacggccacaaaggtgcggtctcggaacgcgcgcgcctgagtgccgatttcgaaacctttgccggccagcagctcagcctgcaacgcctgcccaccttgacgccggcctttcaaaagctgttgctgggggaagtggactacgtgcttgccgggcgctattcgggtatggccatggcgcagacgctgggcatgagcaatgacttgatcgcccgtgaaatacccatcgatcagccgggtttgtacctggcaatttcccataactcggcctgcaacgacccgtggctgcgcggacagctggcgaaaaagatgacagaattacccgcgtccggcgtggtgcaagccgccatgcagcgcaacctggagcgttggaaagcgcaactgcagcaacccgtcggtaccccagcaaagtaaggatttactgtgatttttcgacctctttttgcggccctcgccgttgtcactttggcgggatgtgcagccgatcctgcgccgaatgaacaaatgcgtctcacccggcaggccctggagcaagccagcgcggtgggtgccagtaccgatgaatcccctgaactgaaattggcccaagagaagttctctcgggccgaggccaacatggccgatcaatcgtacaaacgtgcgcgcatgcgggccgaagaagccgagctggatgcgcgtctcgccgaagccaaggtgctgaccggcaaaagccaggaacaattgaacgtactcaacacccggatcgcccgactgcgcaagcaattgcaactgggagaagcccaatgagcccgatgatccgtggtttgagctgtgcattgctgctgggcagcgcggcactgggcggctgcgccagccagcctaacagcgagcaggcgttgcaactggccggcagtgacttccagaaggtcaaggaagacgccaatgtgctgcgttttgcgcccaaagatgtcattcgtgcgggtgagtcactggcgcgtgccgaccgcttgtccagctactggggcagcggcgccgacgtggtgcattacgcctacctgagccagcgctacagcgcgattgcccgcgaacacaccgagcaagggctcaatgccgagcgaggcgccaagctcgaactcgaacgccagcgcctgcaactggcgctgcgcgaaaacaagctggccagcgtacagcagcaaggcaagtggcttgaagaacagatcgccagcctcaccacgacccagaccgatcgcggcctggttctcaccttgggcgatatgttgttcgacaccggcgaagcggagctggaaaactcggccaaccgcactgtgcttaaaattgtgcaattcctgcaactgaaccccaagcgcgtcgtgcgcatcgagggttacaccgacaataccggtggcgagcccgaaaacctcaagctgtcccgtgaccgtgcgcaatcggtggcagatgtgctgatggacctggggattgatgaaaagcgcatccaggttgaaggttacggcgaccagtatccggtggaggccaatgcctccgagcggggcagggcgcagaaccgtcgggtggaaattgtgttctccgacgaaaaaggccaattgggcgctgcccgctaggcgccccacacagaaccctgtgggagctggcttgcctgcgatagcctcaccgcggtccgccagatgtaccgaggtgatgccatcgcaggcaagccagctcccaccccaaagcaaacccgatcactgatcgggtttttcatgtccacacccttacagtttttactgtcactcccgtccgcgctcgactattctcgcaactgtccccgtacacttctaaactgtgccggtatgtttcacacaaaaataaaatacccgtgaaatcgagtgctgcgtcatgaccaatctgttgctttaccaacgtatcgcccagcaactggctgaggatatccgacgcggtgtctatcagcccggcgagcgtgtgccttcggtgcgcaaaatgagctcccagctcaacgtcagccacgcgacggtgttgcaagcctacgccaacctggaagaccaggggctgatccgggcgcggccgcagtcgggttactacgtgcaccagacgccggcactcaccgcaccgacgccggacattgcacgggtcgaacgcccggggttggtcacccgcagcagcatcatccagcaagtattggtcgagtcgcgccgcgaaggtgtgtttccgttgggcgccgctgtgcccagcgttgactacttgcccgtgcgtgcgttgcaccagcaactggccaaggtcacacgcttccagagcccacgggcattcagttacatgttcagccccgggtttgaaccgctgcgtcgccaggtggcgatccgcatgcgcgatgccggcgtggtggtcgacccctccgaagtggtgatcacccacggctgtgttgatgcgttgcagatgtcgttgcgtgtgctcacccgccctggtgacctgatcgccgccgagtctccgacttactacggtttgctgcaactggccgacctgctcggcctaaaagtcattgagatccccagcgacccggccaccggcatgagccttgaggccctgcaattggcggcaaaccagtggtcgatcaaagcgttggtgctgactacgcgcctgagcaatccccttggcgcgaccatgcccgaagagcgacagaaacagttgctgcgcctggcctcggattttgatatccagatcgtcgaggacgatatttacggtgagttgatgttcgagctgggccgcaccaaagccctgaaagcctacgaccgcctggaccgggtgatctactgttcaagtttctccaaaaccttgtcccccggtgtgcgcattggctggatgattgccggcaagtaccagcaggatatccagcgtttgcagatgttcagcacccactctgcgtgcagcgtgacccagatgggtgtctcggcctatctggagaacggtggttatgaccggcaccttcgctacatccgccaggaatatcgcaagaacctcagcgcctttcagttggcggtgcagcagtatttccccgagggcacgcagatgacccgtccgaccggcggcttcatcctgtgggtcagtttgcccgggcgggtcaatactcaggaactgcacgtgcgtgccctgcaacagggcatcagcattgcgccgggcgtcatcttcagcaatacggaacagttcaaccactgtattcgcctcaactgcggtacgccgtggaaccgtgaggcagagcgtgcgctgatgacgctggggatgctggccagccaactctgcctggagaccgcggccgggggcttttgaggtgcagctgaggcaagtatcggggacagcatcgatagcctgctgatcatcaggcttgtcatgcagcgctcaacaagcgagcatatggccctctgccgttaatgctgtaggcaatatgacctctattgttcgcgctgctgtggtgattggcttgttaagcctgtgtaacgtcggcactgtgctggcggcgccccctgtggcggacagccaacctgcagccagcacccagcacaagacccccgcgaagaaaccggctcccgccaaaaaagccccggcagccaagaaaaacgccgccgcggtgaagaagcgcgcaccgatcgcgagcaagtccaaatcggctcatgaagtggcccagaccacactgccaccggcacagttggatttgtctctgccttcggacatggtcaggcacttgcaacctatcggtaccatgccaaaacccaagaacgtgccgttgttgccgccgatgtttgccgaaaagcctgccgataacagtgccttccagatcaacgggcgcttgctcagcaatgagatgaagctgcaattgcgtaacgatgagcgccgggaagtggaaggcgcggcgctggatttcgagttcaagcaataaaacctcaagcgttggtgacgtgaaccgccgaccatctgtcgcagactggtcagtcacttttgttttgtgcgaaaaacccctgttagaccattttaaaacgaatgttttagggcgtactctagcccggccatccacattgagccgtcgaggatctgttgttcatgaaatgccgtgaaggctgtggcgcttgctgcattgccccctccatcagttcaccgttgccgggtatgcctgacggcaaaccggcgggcgaacgctgcctgcacctgtcggtcgaacagctatgcctgctgttcggccaaccggaacgcccagcggtgtgcagtgacttcaaggcagatctggatgtttgcggcaccgaccaggccgatgcaatccggttgattggttggtgggagcaaataacggcggcttgatgggctttactatcggaacttcaacaataaggaatacaacaatgggttcgctgaaacgaatggctgtgttgtgcggttttacagtgttgtttgctgccactgcccaggctgaggattggcaagttgccaaggacgaagacggtatcaaagtgtccttgagcgaaattgccggctccaagtacaaggcttatcgcggtgtgacggtgatcaaggccccggtcgccaagatccaggccctgcaggaagacgtggccggtgcctgttcctggatccacgaatgcaaatcgcagaagctgctcaagactgaaggtgacaagagctggacctacacccagttcaaggcaccgttcccggtgaccgaccgcgattccatcctcgaaatcaccacctccaaggcggctgatggcaccgtgacccgcaaactgctggaagtgccgacctaccagcctgaagtcaaaggctacgtgcgcgtcgcccaggtcgacggcttctggaaactggtgcccaaaggcgataaccagaccgaagtgacctatcaggtgcacaccgagccaggcggcagcgtgccatcgtggctggccaacaagttcgtggtggacgcgccgttcaacaccttgaaagcgctgaaagaacacgctgagaaataagcgcagccggtccggtgcctcgggccttgagtggaacgtttggcgaaccctcaaggtccagatagatgtgagcccacacatgggctttatcgaggaggcaccgatgcaaacgtggcaaattaccttcgttgatgatcacggcgtcaagtccgtggagcagttcacctgcgaacaaaagcccagcctcgaagacgctgcgcacatgattcgcaacaagcttgtgccggtcgcggccgagcttgacctcaatgacctggagggccgcaagcccgagcctacggtcaagatcctcaaagaccagaacagcattcaaatcctcgacatttctcccgccgcctgaacatttcctgactgccatccaaacccctctggtggaggtgatagcttcgcgctactctgcaatcgagatcagcgaatgaatcgctaaggtctggtcttgtcagctacatgcttgttttccctcggtgttgttattgccgtagtacctgcgccagtagggcgcgggcttcgggaagcacggaaagtctatccatcggtttgaggaggacgtttcatgagcacagcctatcaagaagacatcagcaccaacgtactgcgccgcatgaaagaaggcggcttcgacttctcgcgtttccaccccatcgagttttacgccattttcccggatgaggaacgtgcgcgcagggctgcgggccggtttcgcggggaatccctgaatgcccaggtcagtgcgcgcgatgacggcgcctggtatctggagttgagcaaaatcatgtctgccacctacgacggcataggagacttcgagcaagactttggggcggtggtcgagccgctgggcgggatcatcgaaggatggggcgtcaagcaggaggtgcgtgggttacccatgtagcgggattgtatgtgtaatgcagcgtatcggctgacctcagggtcggccgtttttgtttgcgctgcgggaaaagtagtcggaaattgcgggactttttcctgcaccaaaaaaaagccacccaaagagggtggcctaaagggaagagcggagcgctgaagttgtaggacgcatcctgttcagcagatggttgcgattatccgcaggcacggccgggcagtgaaatcaactctgactatgctgttgatagtcaaaacccgcattgcgatgaagcgcggaccaagacgatgtgcattctgcgcaccaggacggtgcaagcaaatgttcgtggttattcaaccaattgatttttaagtgtttatgccgatggcacgggccttgcgatagcgcttgagcctgggtgacaaggagtacggcatgacccgcacttattacgatgaaatgtacgacggggcagggcaggttcgcccccattatcgcgagttcgcccgctggttggccgacacccccgccgaactgctggcgcagcgccgccgcgaagccgatttactgttccaccgcgccgggatcactttcacgctgtatggggacgagcagggcaccgagcgcctgataccgttcgacaccatcccgcgcagcattccggcgagcgagtggcagacggtggagcgcggctgcattcagcgggtcaaggcgctgaacatgtttctcgccgacctttaccacgagcagcgcatcatcaaggctggcgtgatccctgccgaacaggtgctggccaacgagcagtatcagctggcgatgcaggggttggacctgcaccgcaatctgtattcgcacgtctccggcgttgacctcgtacgcgatggcgacggcacttactacgtgctcgaagacaacctgcgtacccccagcggcgtgagctacatgcttgaagaccgcaagatgatgatgcgcctgttccccgaactgttcgccgcccagcgcatcgcccccatcgatcactaccccaacctcttgctcgataccctgaaaagctccagccccctggataaccccagcgtggtggtgctcacccccgggcgcttcaacagtgccttctttgaacatgccttcctggcccgcgaaatgggtgtggagctggtggaaggcgccgacctgttcgtgcgcgacgaccatgtgttcatgcgcaccaccgacggccccaaggctgtagacgtgatctaccgccgcctcgacgacgcgttcctcgacccgctggcgttcaacccggactccatgctcggcgtgcccgggctgctcgcggcctatcgttccggcaatgtggtgctggccaatgccatcggtaccggggtggcggatgacaagtcggtctacccattcgtcactgagatgatccgtttttacctggatgaagagccgattctgaagaacgttcctacgtttcaatgccgtaagcccgatgaactgtcccatgtgctggccaacctgccggacctggtcgtcaaggaaacccaaggctccggtggctacggcatgctggtagggccggcggccaccaaggcggaaatcgaagccttccgtgagcgcatcaaagccaagccacacgcctatatcgcccagccgaccctgtgtttatccacgtgcccgacgttcgtcgagaacggcatcgcgccgcgccacatcgacctgcgcccgttcgtgttgtccggcaaggaaacccgcgtggtccctggcggcttgacccgcgtggcgctgcgtgaaggctcgctggtggtcaactcgtcccagggcggcggcaccaaagacacttgggtggtcgaggactgatgccatgttgagtagaactgcctcggatctgtactggatgtcgcgctaccttgagcgcgcggaaaacctcgcgcgcatgctcgatgtcagctattcgctgtcgctgatgccccaggacgggcgcggcgacggcctgcacgaactggccatgccgctgctgatcaccgggaccctggaggattatcacgagcgccatggcgagctgaacgctgaacgcttgctgcacttcttcgcactggacgctgccaacccggcgagcatctacagctgccttggcgctgcccgggccagtgcccatgccgtgcgtgggcgaattaccgccgacatgtgggaaaacatcaacgccacctggctggacattcgcgatatcgctcagcaggggctcagccgctacggcatgagccgcttttgtgagtgggtcaaggagcgttcgcaccttttccggggggccacttacggcaccattatgcgtaacgatgcgtttcgttttattcgcctgggcaccttcatcgaacgcgccgacaacacgttgcgcctgctcgatgcacgctacgaaatggccggcgaccgggcggcggcggtcaccgacggcacggcccacgcctactaccagtggagcgccttgctgcgcgcgctgtcatcgttcgaggcttacaccgaaatctaccgcgacgcccccggcgcccggcaagtggcggaattgttgctgttacgcgcggacgttccgcgttccttgagggcttgcagcgaagagatcgaccagatcctcgccagcctgccgggcctcaacggccgaccggcccagcgcctggccgccgagatggacgcgcgcctgcgcttcaccgcgatcgatgaaatcctcgaggaaggcctgcacgcctggctgaccgactttattcctttggtgcgccagttgggcgacgccatctacagctcctatctggaggccgcatgagactctccatcagccacgaaaccacctaccattacgaggaccaggtgcgcgcaagcattcagtacctgcgcctgacaccccacgacagcgagcgccagcacgtactcagttggcagcttgatttgccgcgcccggtgcgtgcgcaagtcgacccgttcggcaacatcctgcacgtattgaccctggacgagccccatgacgccatcatcatcggcgcccgtggccaggtggatatcgacgaatcgcgtgaggctgaacacgagagccaatccgcctttccgttcctgcgcagcacccgtttgaccgagcccgatgaagcgctgcgtggctttgccgggcagcactgccaccaacgccgcgaccgcaccgcgttgatcgatttgatgcacgcactcaaccaggcgatggtttacacacctggcgccaccgaggtcgacacctgcgccgcccaagccttcgccgggcgcgcgggcgtgtgccaggaccacacccacgcgttcgtggcgtgcgcgcgcagcctggggattccggcgcggtatgtgtcgggttatttgtactcggaggacagcacgcatttggccagccatgcctgggccgaagcctggctggatgacgcgtggtacagctttgatgtgaccaatacgctgtcgcgcccggaacggcatttgaaactggcggtgggcctggattacctggacgcctgcccggtgcgcggcatgcgccggggcggcgggcatgagcagatgcatgccaaagtgtttgtggcgccgacgccggtgatctcagtgcagcagcaataacctccagaacgaagcagaccaaatgtgggagctggcttgcctgcgatagcggtgggtcagctgcatctgtatcaactgacccaccgctatcgcagcgatgcggcgacccgacaagccagctcccacaattggttttggagtttgctcctagggttgctgcttacgccccgccatatgcttcaaataccccaccagcaaatccagctcgccatccggcagtacactggcggcaaacgccggcatctttgcctgcggccaatgcctcaaactctgcgggtcgcggatgtaacgcttgaggaaattcccgctgaaatattcggtcgggttgtagggcacattcaggtccggccccacctgtgcatcaccggcaccattgaggcgatggcaggccaggcagtttttctggaacacctcaaagccttgattgatcgggtcattggcggccagtttcggatcgggcagcaaggccggaaaccgctcggccacggtctttaattgcttgatccccgccacctggaacggccattgttcagggctgatattgccggcttgcgggtcggtccacaccaggtaaaacggccccgcgcctggcttgccttccgccagcggcggccacggatgcgccgggtcctccaccgccaaccacgcgcgggcgccgtgggtttgcagtaaaggcgcggcgctcagttcagcggcaaagccatccagggcgacggcttgcaggtggttttccggcttcaggccgggtaggagagccgccagcggcactgcccgatacgtcatggcgcgcttgtaggaaacgtcatcaacgatctgcaccgtctgcacgtcagggcgcgcgagcagctcggcggtctgccaggttttatgggtgtggtcgagttcaatggtcaattgcgcggcgccggcggggagggccagcagcaaggcaagaaaggcaaaggtgaatttcaagagagagcccggttcgaagtggcggtgatgcccacgataccggaaatctgcacgcaaaaagacagcccctgcaacaggaccgctatgcgcaatgtcccggcaggtgctgccaaaagctgcagtcctgatgctgtgtgtgcacagagtctggggggcgacttgtcacccgatgaccttggttaaattgggcaagatcagaatcagtgtggtggcgaaaagaatgagtcccgcctgacgaactttcgaatgtttaaacatggctgactgccttttgttgttattcctgagcgtcaaatgcgtgccgtgaatttcagtatcgcgatgtgacgttgcacttttcttacagctgctccggcaaaacccggcagcaactccttactgattcaaccttagagccctcgttcttcgcggcttagatccatttcatatcagctaatcaggaattctgattaaaagggcatgaggcctatcgccatcttcgcgccaacgcctctgctagacagctaaaacgattaacccggtgtttcccgtagctgcctaccgttcgtccgagcgtgggggtcaaaagagatgagcgcatccgtcattgaaaccgtgtcaatcgggcctaaggtaggggcacacacgactgcggttcgaggacgtcatgacccaagctttgatctttgatgcgatacgcacgccccggggtaaaggcaaagctgacggcgccttgtacagcgtcaaaccggtgaacctggtggccagcctgctgaccgcactggcaaagcgcagcgacctcgatacgcaccaggtggatgacatcgtgctcggctgcgtcacccccgtgggcgaccagggcgctgacattgccaagaccgctgcgttggtggcggactggggcatcagcgtcgccggcgtacagatcaaccgcttctgtgcctcgggccttgaagcggtgaacctcggcgcgatgaaagtgcgttccggctttgaagacttggtggtggtcggcggcgtcgagtccatgtcgcgtgtgcccatgggcagcgacggcggcgcctgggtgcttgacccgcaaaccaacctgcacactcatttcacgccgcagggtattggcgccgacctgatcgcgacgctggaaggtttcacgcgcgaggacgtcgacaccttcgccctgcagtcccagcagaaagcggctcgggcgcgcgcagacggttccttcaacaaatcactgatcgcggtgcaggaccagaacggcattgtgctgctcgaccatgatgaatttatccgcggcgactccacccttgaaggcctgggcaagctcaagccgagtttcgagatgatggggcagatgggcttcgatgccaccgcgttgcgggtctacagccatgtggagcggatcaaccacgtgcacacaccgggcaacagttccggcatcgtcgatggcgccgcactgatgttgatcggttccgaggcgaaggggcgcgaactgggcctgcaaccgcgggcgcgtatcgtcgccacagcggttaccagtaccgacccgaccatcatgcttaccggccccgcgccggccacccgtaaagccttggccaaggccggtttgcgcgtggaagacatcgacctgtttgaggtcaacgaagcgtttgcttcggtggtcctcaagttcatcaaagatatggctatcgacgccacgcgggtcaacgtcaacggtggctccatcgccatggggcacccgctgggcgcgaccggctgcgccattctcggcaccttgctcgacgagctggaagtgcgccagcaacgctacggcctggccaccctgtgtgtcggcggtggcatgggcatcgccaccattatcgaacgcctctgagcccaaggaatcagtcatgaccgaagccattcgttacgaaaaaggccaggaccagatcgtggtgctgaccctcgacatgccgggccagagtgccaacaccatgaacgcggtctaccgcgacgccatggcggccacggtcacccgtcttgaagcagagaaagacagcattgccggcgtagtcatcacctcggcgaaaaagaccttttttgctggcggcgacctcaatgaattgatcaaggtcgacaaagcccacgccaaggatttttacgacggcgtggtggtgttgaaggcgcaactgcgccgcctggaaacccttggcaagccggtggtcgccgccatcaacggcgccgcgttgggcggtggctgggaaatttgcctggcgtgccattaccgcgtcgcgctggatgacaactccgtgcagcttggcttgcccgaagtcaccctgggcctgttgccgggcggcggcggggtggtgcgcatggtgcgcatgctggggttggaaaaggcgctgccctatttgctggaaggcaaaaaagtccgcccgcaacaggcgttgcaggcggggttggtcaatgaattggtgttgaatcgtgatgagcttttggccaaatcccgcgcctggattctggctaatcccgaggccaaacaaccgtgggacaccaagggctttcagatccccggcgggacgccgtcgaacccgaaagttgcgcagatgctggccatcgcgccgtcgattttgcgcagcaaaaccaatggctgctttcccgcaccggagaaaattctctgcgctgcggtggaaggcgcccaagtggattttgacaccgcgcacctgatcgaaacccgctacttcaccgagctggtcaccgggcaagtcgcaaaaaacatgatcggcaccttctggtttcaactcaatgaaatcaatgcgggcagctcgcggcccaaagggtttgccccttatgtcacgcgcaaagtcggcgtgctcggcgccggcatgatgggcgcgggtatcgcctacgtcagcgcgagtgcgggcattgaggtgatgctcaaggacatcaatcaggctgccgccgagaaaggcaaggcgcactccgcggcgctactggacaagaaggtcagccgtgggcaattgaccgccgagcagcgcgaaaccatcctctcgcggattcatcctgtggcctctgatgctggcttggcaggctgcgacctgatcatcgaagccgtgtttgaggaccgtgaactgaaagccaacgtaacggctgctgcgcaaagcgtggtgggcgacgatgcggtgatcgcctccaacacttccacattaccgatcagcggcttggcgacggcagtgcctgatcaaggcaaattcatcggcctgcacttcttcagcccggtcgacaaaatgccgctggtggaaatcatcaagggcgcgaacaccagcgacgaaaccctggcccggggtttcgatttcgtcctgcaaatcaagaaaactccgatcgtggtcaacgacagccgaggttttttcacctcgcgggtattcggcaccttcaccaacgaaggcatcgccatgcttggcgaaggcgtggcggcgccgatgatcgagaccgaagcgcgcaaggccggcatgccggtggggccactggcggtgtcggatgaggtgtcgctcagcttgatgagccatatccgacagcaaactgcgaaggatcttcaggccgagggtaaggcggttcccacgcatccggcgacgcaggtgatcaatctgctggtcaatgaatacaagcgtctgggcaaggcggcgggcggtggtttttatgattatcccgcaggcggtcagaaacacctgtggccggaactgaaagcccgtttcgaacagcccggtcaacagatttcgccacaggacgtgcgtgaccggttgttgtttatccaggccatcgaaaccgtacggtgtgtggaggagggcgtgttgatgtccacggctgacgccaacgtcggttcgatcttcggtatcggttttgcggcgtggagcggcggcgcgttgcagtttatcaaccagtacgggctgaacgactttgtcgctcgggcgcggtacctggccgagcaatatggcgagcgtttcacaccgcccgcgttgctgctggagaaagccgcacgaggggaagtctttcggtgatcaaactgcgggagcgggcttgttgtggcgagcaagcttgcttgcgctggggtgcgcagcgcccccaaaaagccggagactgctgcgcagtcagcgggagcaagctccctcgccacaacaagcccgctcccacagtgggtcacttgctgggcttgctttacaggtacctttcaaggcaggctctggggtgtgcattattcccatcaccgtgtcaggtattttttatgtcgctacgcgtctgtatcctggaaaccgatatcctgcgtccaggtttgatcgatcagtaccaagggtacgggcagatgttcaagcgtctgttttccaagcagccgattgccgctgacttcgtggtttacaacgtggtgcagggcgaatatccgtcggacgatgaagtgttcgacgcttacctcgtcaccggcagcaaggccgattccttcggcaccgatccctggattcaaaccctcaaaacctacctgcttgagcgctacgcgcgcggcgacaaactgctcggtatttgcttcgggcaccagcttttagcgctgctgctgggcggcaaaaccgaacgcgcgagcaaaggctggggcatgggcatccatgactacaagctcaacgccaaggcgccgtggatgagcccagtgatggaagagctgacgttgctgatcagccatcaggaccaggtcaccacgctgccggacaacgccacggtcatcgcctccagcgatttctgcccgtatgccgcgtaccatatcgaagaccaggtgttgtgcttccagggtcacccggaattcatccatgactattcccgcgagttgctggagattcttcagacaaccctgggtgaaaaggtctacacccacggcgtcgcaagcctggagcgcgaccaccacggcgcgaccgtggcggagtggatgatgcgttttgttgcgcacaagccggaagcgacggtttaaagccagcctgaccgtttaaagctggcccacaaactggtgcagcccaccgcaataaacccgagcaccgcaaaatagccgtagtgccattgcagctcgggcatgttctggaagttcatcccgtaaatccccgccactgccgtggggaacgccaggatcgccgcccacgcggcgaacttgcgttgcaccacgctctggcgcgacgcctccagcagcacaccgatctcgatggtctggctggcgatatcgcgcagggtggtgaggtcttccatctgccgcgtcacatggatctgcacgtcgcgaaagtacgggcgcatgttcttgtcgataaacggaaagctcagcttctgcaactcctggctgatttccaccatcggcgccacataacgcttgagccgcagcacgtcacggcgcaggccgtgaaggttctggatgtcgcgttcgctcagcgaactgcacagcacgttgcgctccagctcatcaatctcggcgtggatggcctcgctgaccggctggtaattttcggtgacgaaatccagcagcgcatagagtacgaaatcttccccatgctccagcaacagcggccgcgcctcacagcgttggcgcacaaagccgtaggacgccgagtgtccgttgcgcgcagtgatgatgtagccgttgccggcaaagatatgggtctcgataaactccagcttgccgttctcgcgcaccggtgaataggtgacgataaacagcgcgtcgccgaaggtttccagcttggggcggctgtgtttttccagagcatcttcgatggccagctcatgcaggttgaactggcgttgcaggttggcgagttcctgtgcgttgggttcttccaggccaatccacacaaagtgatcgggcttggcggcccaggctgcgccttcatcgagggtaatatcggtgactttcttaccggcgctgtagacagctgccgcaacaactctacccatggtgctgttcgcttcttgttgggaggacaggtgttgggcagcttagcctgaatggcgttccgttgttacggtcatggatacgcgctttttgtggtgagcaagcttgcttgcgccggggtgcgaaccgcccccaaaaatcacaaaggcgcaggcgtccagtcggttcgcaactctaggtccatcgcctcgatgcaagcctccatctgcgcctgacacgcctgcatcaacgccgggatgtcatccgaagtcaggccagtggtaggaatcggcggcaacgagcgtatgagcacatccccactgttccagcgattaagctgcatatggctgacgtaattgctcacacacacctgcacgatgggcacaccggccgcaatcgccatatgaaatgcgcctttcttgaacggcagcaaacctttgcccagattgcgcgtgccctccgggaatacccagatcgatgtgtcctcatgctgcaaggtgtgcgtggtggtcagcatcgcgcggcgcgccttgtgcgcattgccccggtcgatcaacacattgcccgccagccagaacaattggccaaacaacggcacccatttcaggctctttttggcaatgcacacggtgcgatacggcaccacggtgccgaacacaaacaggtcgtagttggattggtggttggcaaggatgacgcacggccccggcttgtttcgcagtgagtcgacatccgccttcacattcaggcgcaaaattcgcatcgcgggcaacgcataaaggcgcgcgcacaggcggctgttgtccgggttgaaggggcggcagacacccaaaagcacgcccaatactccagcgaccataaagtgcaggcccatcaacaacatacgtaacagataaagcatcgacacggcccatcgggacaaaaggtggcgcagtgtacggatgtgcactgtattcggcaattgcccctacagacgtgggagataggcgatgtttaagcacatgtttcaacaactgccgccatggcccggctagagcggctaaagacgtttcggatttatttgtaagaaaaagcccgactcaaggtcgggctctggcgctgcgagggtaggacttaacccaggttgtggccctgatcctgaatgatcgcatcgtccagggcgtccagcagcgccttgcgcactttcaacttggtgtgtttgtgcgcgttcatattgatcttcttcaactgacgcgccgcttccaatgctgcggcgtgcagttcctcaggagcaaccaccttatcgaggaagccggcaccgagcgcaccttgcggatcaaacatttccgcattgatgaccgagcgatgaaacgccgacttgcgcaaacgatcccgcgccagctcgatgccggcgtggtgcatggtcatgccgattgccacctcattcaggccaatgctgaacggaccttccacaccaatccggtaatccgccgacaacaacagaaacgcacccttggccactgcatgcccggggcacgccacaatcaccgggaacgggtgcgacagcaggcgacgtgccaacgtcgagccggaggtgaccaggccgatcgcttctttggggccggcggtcatcaccttcaaatcatacccacccgacaaaattcccggcgtgcccgtgatgatcaccaccgcccgatccttctcggcctgatccagcgccgcattaaactcagcgaccaccgccggggaaatggcattcaccttgccgttgctcaaggtcagtgtcgcgataccgtcttcgaggtggtaggagatcaactcactcatgacgcggttccttgtaagacttgttatagagaggctgtttatagacatgcatgcgcagacgttacccaccacgcccgtcccggtaaagcgccgtgactgactactcagtcagacttttcccgcatccccaagggtagacggcccggagcagggcgcagcaaccgccccagacgcctgcagcggatgccagagaatggcagaatcaacgcccctcgccaggcgtgccacggcataaccgtctaagcgcatgaaaattctgaaaaaaacctttgccatcagaaaggctttcgactacattagcgcgcctcgacagactgaactggtttgacgagatacggtgaagtgtccgagtggcttaaggagcacgcctggaaagtgtgtatacaagaaattgtatcgagagttcgaatctctccttcaccgccacattaagtaaacacaaacccctgattttcctagagaaagtcggggggttgtggtttttggcgtcttaaaaaagctcttcatcgtatgtttgcggccgctaaccatcacaggatatgaaggttacccatgcgtttgctctttctgctagccgccggcttgacgctctccggctgcgccaccactaaaaccgatgttcgcaacgaagcacaaataagcctatatgatccggccaatacagctcgtgtccgcctgatcacgggtgatacttcaaacgcgggctttgtcagtggtcagacttgcgagaccttttacaacaggtcccttctgaccaagacgcctgaagaagctggatggcaaacagcgcatgtggactcagcaggcctttacccttttcggtcaacagaccgtcagaacagcgtgattggcatgccttccagcaaggcgagcaaaagcatcaaccagtcgcccaaagtgtttgacgagcacgtcatcccggccggtcaaccctttatcgcagggttcgccatgggagggtcacaggtgtcctgctttcctgcgcccgtcacgctcacacccgagcccggcaaaaattatgagttggaacttcaagttatacagctcagtacgttcaaggctggctgtgtgattgccgttcgccaactctccacacaaggcagcgtcaccgttgaaacgccgctaaggccacaggtgtgcgccaaaactccggcgggctggtacaccgtcaacccagtgcctttgccttaagagaggaaaaaggcaggcgtttttaatggtgtgaattgagttgatttcataaaccttctcttcttcgctagccggtatttatttatagtgaggccctcaatcaacccgcacgcagagaaaacaacatggacgaaaaagtattcttcaatcaaggggatgtaagcgtaagcaacagcagatttattgtggacggtcagacttatgcgatgagcaatgtgacctctgtgaaatcgcgtgttacgccgccggatagaggtgctgcaataattatcgccattgtgggcctggcgtgtttgttggggcgcgggtcagtgtttgtagcggggttgatagcgctggctatcgctgttctggtttggaggagtagtaaggcaaaatacgctgtcgttttgaacacctcctcgggtgagaaccaagcattggtaagtaatgacaaaacctatataaccaatgtgattgcctcgttaaatgaggcgatagttagccggggctgatactcgtcgaacgagtccagtaatcggttccgcaaagaaacgtggcgatgaaggagggggcgggtttattcaggtgttgcgtttgcacgctttaaataaatcagttccctattttcaatgcaagaagggcggctattgagccgccctgatacattttcggaaactatcgtttctcaatgcctatgccgatgatgcacatccggaaaatgcgcatgactatgccgcaacgggctgtgcacatgcacatgactatgcggctgccccggttcccactcaaacccatgctcatgctgatgatgttcgtcatgcacatgccggtgcccgtgctccgtcgcctcatgcagatgttcatgggcatgccgttccgtcaggtgcagccacacgcccacggccatcagcgccagcgcgatccagaatgccactgacaccgactccccaaatatcagcagcgctaccgcagcaccgaggaacggcgcggtcgagaagtaggcgcccgtgcgcgcactgcccagcccgcgcaacgccagcacaaacatcaccaggctgacgccataccccaaaaaaccaaccagcaagataggccccaactggacgagccccggcagctgcgccccgagataaagtgccaaaccacagttcaccacgcccgcaatcaaccccttcgccccggcgataaacagggcgtccgatgccgacaccttgcgcgtcaaattgttatcaaccccccagcacaggcacgcaagtgccaccgcaagcggcccggtccagtcatggctcgcgccgccaccgtcagaccaggacagcaccacgccacccagcacaatcgcgatcatccccagcacaatgcgccggtcggcgttttccctgaacaccagccaggcgatcacggcggtcagtaccgattcaaggttaagcatcagggaagcggttgcgccggcggtgcgggtcaggccgaacatcagggcgacgggcccgagaatgccgccgaaggcgatggcgccgatcagccagggccattcggaaggggtgagcccggtgggttgccagccgcgatcacggatcaggcgcacgccggcgaggccgatgccgctgccgaggtagagcaggcctgcgagcagcacgggcgagaggcccagaccgaggcttttggcgagcggggtgctggcgccgaacagggcggctgcggcaagtgcgtagataatactgaggttcatgggccgtcctcgaaggtctggcccatgatacgtctcacaccggggttaaagccctggcgtttttgccagcttcacgatcatttattgcgcagttttcagcttgatcacgtcaccggagatcttggtggtgtagccgctgagtacccaggcccagaaccagttttcctgcacttgggtgttgatcagcgcgtcgccgcctttggccttgatggccgcatcctgagcgcgcacgaaacggctgttctggccaatcgggatgatgccgaacagcatgatgccggtggcgctggcttcactgtggcccagcacggtgtattggctgctgtcgtactgcggggatttgatggcggtgccggtgcagccggcgagtgcgaaaccaagaacggcggctgcagcgactttactgatgtacttcacggggtaactccatgggcaaaaatcgagatccacttctcgaaggcgcgccactgtaatcccggtggtggcagattgaaatcaactgtccgaaagtttcatcttcacgcttgcacgtacacccaggctgtcagaccggacgccagggccaccgaaacccgcttgtagtccgacacctcgtacgcatccgccgccgccagctcctgctcgttgatctgaaataccatgccttcgacgctggcagctttttcttcagtcggcgcgacgattgggtggtgggtcttgccgctggtcgccagcacttcggggtcggtgatttcgacccagctttgcgaatagccgagcatcgcatcgtgctggccgaccagttcacggccgaagttggcgagttgcacggctttgtcctgcaaggttccgtaggaaaacagcaatacggggaattgggtggagtgatccatgggtgttccttaagcgagtaggtcttcgtaaaaagcgccgtagggcttgctcgggtgggcgatctggatttccagaatccacagcccggcatttggggtgtgctcgaagtcgccgaggtcgccgccacggtggatggcgtgggggaagtcgctgacgcggtggcctttgatgtcgaggttcagctgccagcccatcgcgcgggcctgttcttcggcgtagcggtagaggtcgaggccgacgacgcgctcgtttttccagcgcgattgtacgcggtcgaacagttccttggcggcgctggcgcaggcgatcatgtccgggtcggtgccggtgctgaaggtggcgccggcatcgccttcgtggccttgccagacggcgcccatgtcgatgaagaagatgtcgttttcacccagcacggggtcgccgtccgagcgttgcttgaaggtcttgagggtgttggcgccgaaacgtaccagcagcgggtgccagatgcgttgtgtgtccagctcggcgagtagctgtttgcccagctcgcgggcttcggattcgagcatgccggggcggatgcgctgggcgaggttgtcgatggcttgccaggtcatggcttgggcgtggcgcatggcgtcgatgctgtaggcggcgcccacggcttctttggggtgtgcagtcaccggtttttcctcgggctgggctggtcgttatgctttttactatatagcgatgcgatggccgaacccaacttccaaaacaccacaaaacaaatgtgggagctggcttgcctgcgataacggtgggccagcttggacatcagtcactgacaggcccccatctcaggcaagccagctcccacatggttaaccgcgttcagtcagtcacagatgcaaccacgccaaaccacccaacaccatggccacaccgccagccgtgtacgacaggcgttttagccattccttgcgggtgagcaacgtaatcgccgccaacgaaatcgcgatctgaatcgccgtcatcgcttgcgcccagcggtggtgctgatgcagcgcctcttcggacttctggtcccattccctggacgtggcctcaagcttttcagcctgcttacgcacttcttccttctggcttttatagcgctcgatctcatccttgtaatgcgccgcatctacgccgggaatatgcgtggccagttccgccaaattctgccggctggatttggcctggtagtaattccactggttggcggcttcggtcttgatgatggcggcgttgttcttgtccatcgccgcttcgctttcggtggagccggcctggtagctgagcatggcaccgagggtggccattagcgcggtcatcacggcgatgcggctggcaaagttgtcgccacggccgtgggcgtgttcggtggtgtgttcgatgtgtttttcgtgggggctggggacttcgaaggcttcggacatgggggcgtctgcgaacggaatgagggagcctgattcttcaccagcgcagctgtctcaatcctgtacgtaacgctgcaaaccttccaccaacgcatcaaaagtcacccggcagcgcgggctgttgcgcaggtcttcatgcatggtcacccaagtgtccagtttcaacgagaagccttctggcagcacccgccgcaaacgcgggtcgcgcttggccagttgcacctggcagccgccgattcccgcgccggctcggatcaacgccaattgcgcgatatcgctgtcgcagctcaaggcaaacgcgctgcgttcaaagcctttgatcgccaggctgcgaatgaaggcgttttcctggtcgaagccaatcaccgagtggcttgccaggtcctgcatgtgcagcgggatgccgtgttgttgcaggtaatcgtcacgggcatgcaggccgacttcaatcaaaccaatacggcgcgccagcagttgctcctggctggggcggaccatgcgtacggcaatgtccgcttccagttgcagcaggtcgctgaggcggttggtgaggatcagctcgactttcaactgcgggtgctgccggcgcagctgggtgacgattggcggcagcacttccacgccaacgacttcgctggcggagatgcgcactacgccgcgcacttcatcgccctgtgaggacgccgtgcgctccagcgccgcagcggtacgctccatggtttcggcatgggcgcgcaacgtatgggcgacggcggttggcaacaacccttgcggcgagcgcgtgaacagcgccacgcccagtgccgtttccagcgcggcaatatgccggccgaccgtaggctgcgtgataccgagcagccgtgcggcccccgacaacgatccctccttgagtacccccaggaatgaccggtaaagctcccatccaatattagatgccatgcataaatgtatagctgatcggcgatcttcggcaatttatctatagcagtgccgcgcacacactggcttcaacaaccaacagaggcgggagacgcggtgatgagcaaagtgctggtattgggtgcaacgggcgggattggcggcgaagtggcgcggcagctgaaagcggcaggctgggaggtgtgtgccttgacccgggacgtggacaaggcacgccgtcagaacgccgcttttacctggctgaaaggcgatgcgctgaaccgcgaggaagtgcttgtcgccgcccgtggctgtgcggtgatcgtgcacgcggtgaacccaccgggttatcgcaactgggcagggctggtgctgccgatgatcgacaacaccatcgcggcggccatcgccgagggcgcaaccatcgtgctgcccggcactgtctataactacgggccggatgcgtttcccgtgttgcatgaagattcaccgcagcacccgcaaacgcgcaagggcgcgattcgggtacagctggaacagcgcctggaagaggcttcccgccatggtgcgcgggttttgatcgtgcgtgccggggacttttttggtggccaggcggccaacagctggttttcccaaggcctggtcaaacccggcaagccggtgcacaccatcagttatccgggtgcgccaggcctgacgcatcaatgggcgtacctgccggacgtggcgcgcacgatggttgagttactggcgcggcgtgccagcctcgacgccttcgcgcgctttcatatggccgggcacgcagacagcgacggtaggcagatgagtcgggcgatccagcgagtggtgttgcgcaggacaggccagcaaccccgcgtaagcactttcccgtggtggcagttgaagctggccgcgccttttgtagcgaccttccgtgagttgcaggaaatgcgttacctgtggagcacgccgttgcgcctggaaaacgcgcgtctggtcgaagtgctgggagaggagcctcacacgccgctggaacaggcagtagaagccacactgagcggtttgggctgcctgcctaaggccgtctgatcaggcgcacatacaccgcgatgttgatcagcaacaccacggccccgagcatcagttgaatgttcggggtcagcccggctgggtagatcagtgtgagcacgtaatgctcgataaaaccgccgccataaccgtcctgcccggcgaggtggcgcagcaggttttcccaacgggtcagcgggcagggcaggtggaagacttccacggccacaccccaggcggcggcgggcaagtgcaaccacacgacgcgccgccatttgagggccagcaagccgccgaacagcacgaacaggatgaagcacaaatgaaacagcaccaggccgtcggccgctacgcgatagagcatgtcgagcttcacttttaaggttggccggcgtcaggcgccgaggtgttcttgcaggtagtcgataaacacgcgcagtttcttcggcgtgttgctgcggttgaagtaatacagatacaacgcgctatgggtgatccagtcgcccaatacttccaccagttcgccggattgcacgtgcggctccacgctggaacgcgccacgtaggcgaagccgaaaccgtccagcgcagcgcggatcatcagctcgatgtcattggtggcgagccggcccttgaccgtgacccgcatcggtttgccgtctttttcaaagtcccagcggtgcagcaagccagtttgggcgctgcggtaattgacgcactcatgctcaagcaagtcatggggatgcgtgggcactttacgcccttgcaaataggccgggctggcgacgatgacaaagcgcaactggcgcgccacgggaatcaccaccatgtcttcggccagcacgtggtcgtagcggatacccgcgtcaaagccctgggcaacgatgtccaccaaggcgttgtccaccgccacttccaggttgatgcccgggtgtgtacgcaggaagccctgaagcaacggttgcagcaccatgcggctggcggtggacggcacgttcaggcgcaaggtgccgctggcttcgaccgtggcggcggcgacgctgtgcaggctggtttgtagttcttcgagcaacggggtgattttttccagcagttgcgtgccggcttcggtgaggctgacgctgcgggtggtgcggttgaacaggcgcacgccgagctgtttttccagggcgccgacccgctggctgacggtggagaccgacaggctgaccgcgtcagccgcctgggtaaagctcctggcacgcgcgacttgcaggaacaggcgtagttgctggaaatcaggcgagtccattgtgtggtttttccgaaagggtcttgtggattatgcatctttttcacaagaaggcccgcgcgcatacttttttcacacccacgaggaaggcttctcatgactgattcagcggcaaaacctgtctggtttatcaccggttgctccaccggtttcgggcgccagttggcgttgcacaccctgagcctcggttacccgacggtggtgaccgcacgcaacccgcaacaggtgcaggacattgtggccgggcatgaacacaacgccttggtgctggcgctggacgtgaccgaccaagcccagattgacgcggcggtacaggccgctcaagcgcacttcgggcgcattgacgtgctggtcaacaacgccggtatcggctacttcggcgcgttcgaagaaagtgacctggacgaagtgcgccgcatgttcgacatcaacttctggggccttggcgccatgacccgtgccgtgttgcccggcatgcgtgcgcggcgctcgggcaccgtggtgaatatttcctcggtgggcggtattgctgcgttcccgtccttgagtttctacaacgccaccaagttcgcggtggaagggttgtctgaagccctggcaggggaagtcgcgccgctggggatcaaggtacttctggtcgaacccggccctttccgtaccgactgggccgggcgttcggccaatgaggccccgcacgccatcgatgactaccgcgagacggcggcggcacgtgccggccgagtgcgcagctacagcggcaagcaaccgggtgacccggtgcgcgcggccctcgccatcgtccaggcggtggaagctgaacaaccacccctgcgtctgctgctgggcaaggctgcgttggggtttgcacgcaccaaagttgacgcgttgaatgcggattttgatgcatgggccgaggtgactgagggggctgactttcccgagtaaggcctgagggtgaaggcacaggggtggtcgtaacggttgcttgcaggcgagccgggccgctattgtgctgaatccttttagtctttccccagggttttgttgagatgaatgcaccgcgtactgctgccggtccgatcaaggccgtgattttcgatatggacgggttgttgctggatacggaaggcatctacaccgaagtcacgcagatcatcgccgaacgctacggccggacctacgattggggcatcaagcagcacatcatcgggcgtggtgcccaggacttggccgattacgtggtcaaagcgctggatctgccgatcaccccggccgagtttcttcagattcgtgagccactgatgagcgagcgtttccccaaggccctgggcatgcccggcgccgaggcgctggtgcggcacttgaaggcgcacaacattccgattgccgtgggcaccagctcgtcgcgtaattcgtttggccacaagacgactttgcaccgcgagtggttcagcctgttcggtaccatcgtgacggcggatgacccggaagtcggcgccgccaaacctgcgccggacatcttcctcacggctgctcgccgtttgggtgtcgcgcccgaggattgcctggtgttcgaagattcgccgtttggtgtcactgctgccaaagccgccaacatgaccgccatcgccgtgccggatgaggccatggctgacagcaagtatcagcacgccgaccagatcatccgcaaactcgcggactttgatctcgcggcctacggcctgcctccgtttccctgactcaaatgcgctaaaaaatgtgggagctggcttgcctgcgatagcggtgggtcagcccggcatcgggcactgatacaccgctatcgcaggcaagccggctcccacaggagccagttgccgcactggctcaggcgctgaagccaccatcaatggtcaggcttgcaccggtgatatacccggcttccggccccgcgagatacgccacaaagctggcaatctcttccacatgcccgtaccgcccaactgccatcaacccaatcaaactctctgcaaaatcactggtcgccgggttcatgtcggtgtccaccggcccaggctgcacgttgttgatcgtgatgccgcgtggccccaggtcccgcgccaggcccttggtcaggccgaccagcgccgccttgctcatcgcataagggccaccgccgccaaacggcatgcgctcggcgttggtgctgccgatgttgatcacccggccgccgtcagtcatatgcttggctgcttcctgggtggcgataaatacgctgcgcacgttgatcgccagggtctggtcaaagtcttccagtttgaagtcttccagcggtgcgatggccagcacaccggcattgttcaccaggatatccaggcggccaaaggcttcgacggtggcgttgacggcgttgcggatggcgtcggcgtcggcgctgtcggcgtgaatcgccagggctttgccgcctgcgctgatcacgctgtcttgcagtgcttcagccttggcggccgaactcacgtaggtaaaggcaacggctgcaccttgtgccgcgaggcgcttgacgatggcggcgccgatgccgcgggaaccgccttgaatcaaggcgactttgccgctgaggtcttgtgtggtcatgtcgatctccagagagttcaaggcgggagtgccttgttgttggaaccgagtatcgacctcgtcagcccctcccggtagaccgtgattgctatagtctgtgtaaaccagaagtttagagtgggtcgatatggaaagctttggcagtatcgaatgcttcgtgcgcagtgccgaaggtggcagctttgccgaagcggcgcggcacttgagcctgacgccggcagccgtcggaaaaagtgttgccaagctggaggcgcgcctgggtgttcggctgttccagcgtagtacacgccgcctgaccctgacggaagccggcaagctgtttctcgaagaagtcagcggcagtctcaccaccatccagaatgcggtggccaacctggccagttccgaggggcggccggctggcacattgaaggtgagtatggggacggtcgtcgggtgtatgtacgtggtacctctgctgggcgagtttttaaaacggtaccccgatatcagccccgactggcatttcgacaatcgtcaggtagacctgatcggccagggtttcgacgccgcactcggtggcggtttcgaactgcctcaaggcgtggtggcgcgcaagctggcgccggctcacagggtattggtggcatcccccgaatacctggcggcaagggcagcggttttacaaccagcggaccttgaacggtgcgatggcatcctgattcggtctccgcaaacggggcgcgtgcgctcctggcaattgaccggccgtcgtggcgagcaagccccgttgaacctcaaggcgcggatgaccatgagtgattcgcaggcggcgtgtgtcgcagcagaccaggcattgggcatcgcgttggtaagcatgccgtttgcggtgccctggcttgccagtgggcagttggtacgggtgttgccggattggttcgtcgatgacggcaacatttccatctattacgccgaacacaaactgctgcccggcaagacccgggcgtttgtggacttcatcatcgagcagtttgccgggcagcagttgagccagcggttcagtgcggtttgagcatggctttcgaccaaggcgcggccatcgcaggcaagcccgctcccacaggggaatgcatttcaagctgcaaacccggtcaactgtgggagccgggcttgcccgcgatgcaggcggctcggtctaccggccaaacttgccgggccagccaatgactttcttcggccttggcgtcgcataggtgcggattttcgacgtcgacaagcccaggcgaaccagcgattcagcgatggtcaccgccgccgtcacgccatccaccaccggcacgccagtgcggtagcgaatctgctcatccagcccggccatgccgccgcagcccaggcagatcacttcggctttgtcttcgctgatggccagctcggcctggcgcacaatggcttccatggccgccagcgggtcttcttccagttccagcaccgccatgccactggcgcgcacagaggcacagcgctggtacaggcccgcgagttttaaacgatcttcgatcaacggcacggtgcggtcgagtgtggtgaccactgaataggcatgccccaaaaacatcgccgtgctggcggcggcttcggtgatgtccaccaccggcacattcaacaattcctgcaggccttcacggccatgctcgccataaccggcctggatcaccgcatcaaacggctgatcgtaggccatcacccggtccatcacggcgatggccgccaggtaactttcaaaattgccttccaccgattcggcgccaaagtagggcgtgagcccgacaatctcggtgcccggcgcggcgactgcccgtgcttgctgggcgatggtttcagtgatggattcggtggtgttgacgttgaccacgaggatacgcatggaatgtccttgattagtgactgacgttatcgactgcaatactttcgccgctgacatcggcgtagaacggctggcgcttggcgatcagcaagtacagcaaccctgcaataccggcgccaaacatccaggaaaacggtgcgacgctggcaaagccgggcagcagtgccaagagaatggcgatcagcgccgcaggaataaacgccgcgactgcgcgtaggttgaccccacggctgtagtaataaacgccatgcgggtcttcgctatacagttgcagcacgtctacccggcttttacggatcagccagtagtcgaccatgatcacgccgtacaacgggccgagcagcgcgccgaggccggagaggaaatacacgatcaccagcgggctgttgtagaggttccacggcaggatcagcaccgccagggtggcactgatcaacccggcgcggcggaagttgaggtacttgggcgccaggttgctcagcacaaaggccggggccacaaagttggccatgatattcaccgccacggtgacgatcaggaaggccaggcaccccagcacgaggaagaaggtattggggatggccgcgatgatttcggtcgggctttcaatcacccggccattgagttggaactgcccgccgcacagcagcacagtgatcgcggcaaacaccagaatattgacgggcaggccccagaagttgccgacctggatggtcttgcggcacggtgaggaacgggcgaagtcgcagaaattcaggatcagcgtgccgtagatggtcagccacagcgcgccgccggcaaagatattgcgccacatctcgccaccgctcagcggttcgcggatcgaccacgcgatgttgccgccgacctgaaagtacatccagccggccagcgaggccaccgtgaccagaatcaccggcccggcgaaggcctcatagcgacggaccatctccatgccgtatgccaggatcgccagttgcacaaaccagatcgccacgaaacacgcccagcccaaggtcgacaggccgagaatcgagttgtggtcatagtcggcaaagcctggatgaatcgccgacagcagcacgcggaaaactaccgaggccaggtaggtctggatgccaaaccaggcaatcgcaatcaccgcccgaatcagcgccgggatctgcgcgccatgaataccaaaactgatacggctgatcaccgggaacggcacgccagtcttctggcccatgtagcccgacaggttcatgaagaagtacaccagcgccgcgccgatccccagggataacaggatctgccagccgccaaggcccagcgcatacaagccgatggcgaacgaatagttggcgatgttgtgcacgtcgttggtccacaacgcaaagatgctgtagcgcccccagcgccggccttcgactttggtgggcgccaggtccttgttgtgcaggcgcgggctgagtaccaacgggccggggcttgtagcctcgggtgtcagtgaggaggagggcagatccagtgcgatgttgttcgagaggcttgtacgcattccggcaggctccggcgcatctgccgcaaagcggaggatggcaaagtgtatgtatgttttgtattaattgtatacaaagcgcatttcaccttaagccacatgcgtgccagtttttggtctatgaaaatcctgcttaatttctttttattagatcggataattaacgtgctgaattttaagcaatataaattgaccgcttgaacaggtatttatttttgtcggaaaggagggtggttcaaggacggggtgtataggcgggaagaggtgttacgtaatggtgcggataacgataaattgcacacataaatggcaccgatggttacatgtgtgtgtacattttttaactcaacacaaaacaaatgtgggagcgggcttgcccgcgatgcgggcacttcggtgtgtcagtcacaccgcggtgatgctatcgcaggcaagccagctcccacacaagcccgctcccacactttttactgcgccaaggcttacgccttgctgatgatattccccgcatgcagcccgcattccttctgcgtggcttcttcccaccaccagcggccttcgcgttcgtgctggtttggcagtaccgggcgggtgcaaggctcgcagccgatgctgataaagccacgttcatgcaggctgttatacggcaactccagcatgcggatgtagccccagacttcctcgctggtcatctgcgccagcgggttgaatttgtacagagtgcgttccggggtagagaacgctgtgtcgatttccagcgcggccacttggctgcgtgtccccgggctttgatcacggcgttggccggtcgcccaggcgctgacgccggagagcttgcggcgcagtggctcgatcttgcgcacgccgcagcattcaccgtggccgtccttgtagaagctgaacaggcccttttccttgacgaacggttccagcttggtctggtccggtgagatcagttcgatgtcgattttgtagaaatctcgcacctgctcgataaaccggtaggtctccgggtgcaggcggccagtgtcgaggctgaacaccttgacgttcttgttgagcttccaggccatgtctaccagcaccacgtcctcggcaccgctgaaggaaatccacaggtcatcaccgaactggctgaaggccagcttgagaatgtcctgggcggatttgttggcataagtcgcggcgagttcagcgacgtcgaaggcttggttcatcaggacggttcctacaggtcagtggcgctgagcgctctataggggagcgatggtatcaaaatccgtcctgcgttgcggtggcgagcttgaatcgctagagttcggcagtccttttgctcgctcaaccgacaacatcaaaactgggagtgtcttgtggaaattgcctgtctcgacctggaaggggtgctggttccggaaatctggattgccttcgctgaaaaaaccggtattgaatccctcagggccaccacccgggacatccctgattacgatgtgctgatgaagcaacgcctgcgcatccttgacgaacacgggctcaagctctccgatatccaggaagtgattgccacgctcaagccgctggagggtgccatcgagttcgtcaactggttgcgcgagcgcttccaggtggtgattctgtcagacacgttctatgagttttcccagcctttgatgcgccagctggggttcccgaccttgctgtgtcatcgccttatcaccgacgaaaacgaccgggtggtgagctaccaactgcgccagaaagacccgaagcgccagtcagtgctggccttcaagacgctctactatcgcgtgatcgccgcaggtgattcctataacgacaccaccatgctgggcgaagccgaccgcgggattctgttccacgcgccggagaatgtaattcgcgaattcccgcagtttccggcggtgcacacctttgaggatttgaagaaagagttcatcaaagcctctaatcggccgttgagtctgtaagttttagtggggctgatggcctcttcgcaggcaagccagctcccacatttgatcgggttcacaccgttaaaaatgtgggagctggcttgcctgcgatgaggccggcccggtcactgcacatccagcgtcaaccctccaccagcaagcgctcatagggaatgctcaagccctcatgcaggcgcttgatcatcgacaggctcagcttgcgcttgtggttcaagacttctgacacccgcccgctggtgccgataaagggctccagatcgcgggccgtcatgcccagttgttccatgcgaaaccggatggcctcaaccgggtcggatggcggcatgggataatgttgcgcctcgtacttctcgatgagaatggcgagaatttccagctcgtctccctctggcgagccgatctccgctccccatatctgctccacccgcgccagcgcggcggtcaggtcttcctgggaatgtatgggtttgatgttcattacaggttctccgcatggatctggtcgtactgagcgtgggttcccacgaaacgtatgaacccaagctgtcgctgataatcgatcgccatgatgactcggtacttgttgccacctacgttgaagaccaccttgccacctttaagaatgctcgccgttctgagctcggccttgagtgcctgcggcgtcgggtaaatggctttctccatgtggcgatacaactcaatcaagggtgttttggcatcgctgtaagcggggtggctttcccagaatattcgcaatgtcgagagggcgattatccgcatcgcttggtcctcccgttttgggagatattaggtggggttggagagagatgcaatctcggaaacattatctgacgagttggtaatcgcttcatgtgatccttcacagacggcaggtggacggtcgtggctggacgctatccctcggcgtcaaacggcgtccataaacgatctgattcagattttttccagcagacaagctctgcccgtgcaggcagagcggaccggactgctacaggctttccaaagtgtgtaacaacacctgcaccttggtcagcgactcctgatactccgcctcccactgcgaatccgcgacgatcccgccaccgccccagcagcacacctgcccgtccttgaccagcaagctgcggatcgcgatggagctgtccatctcgccgcgcacgtccagatacaccagcgaaccgcagtacagcccgcgccgtgtcggttccaactcatcgatgatctgcatggcacggatcttcggggcgccggtgatggagccgccggggaagctgccggcgatcaggtccagagcgtctttgtcggcggccagctcaccggtcacgctgctcaccagatggtgcacgttggggtagctttccaggctgaacagctccggcactttcaccgagccggtgcggcaggtgcggccgaggtcgttgcgcagcaggtcgacgatcatcaggttttcggcacggtccttggggctggccagcagttcggcggcgtttgccgcgtcttcctcgggcgtcaagcctcgcgggcgtgtgcctttgatggggcgggtttcgacgcggcgctcgctgatgtgcacaaagcgctccggcgacaggctcagcactgcaccgtcgtccggcaggctctggaacccggaaaacggagtagggcaggcctcacgcagggcgcaataggccgtccacgggtcgcccatgcagggcgcgcgaaagcgctgggcgaagttgacctgatagcagtcgcccgcctggatgtaatcctgaatgcgcacgatcgcctggcggtaagcctcggcggtcaggtccggggccatggggccgtgcagtttgaagatcgcggcggtgtcgacaacgtcatggctgaacagcgcgatcagacgctggcgctcgctgcccgcaaatgaggggtgaaacaccagttggctggtctgcgcctggtgatcgctgaccagcgcccaggcatagagcccgaagcgcgcatccggcaggtgtaaatcatctaccgcaaggtgcggcagctgttcgaggtgccggccaaagtcgtaactcaggtaaccgatcaagccaccggcgaacggcaattcataacccgcaggcaaagcagcctcgcccagctgtgtgaggttttgccgtagccgttgcaggaaatcactgccgctttcgtccggcgctaccgtcaacgtcgcatccggccacgcgctcagcaggtcatagcgcccgcgttcggccgccgggcggccgctgtcgagcagcaccgcgccgggggcatggcgaatcgccgtgaaatactcggcggggttggcccggtagggcagcgggtgtacggaacaggtcgacatgcgaagcgaatcagcggttggcttgggggaggcgattgtagtcccctgtcggttctggtcctagaggggatgtcggggatagacagattgaggcctgactttaaacaagagttgattgccaggacgtcatcgcaggcaagccagctcccaccttggaatgcggtcaacctgtgggagctggcttgcctgcgatgaggccctcagccctctaccgcaggcacatggccgaacatttcctgcacaaacctcacccgttcttccggcgtttcggtgataccggcagccttcaattcttccagtcgcgcctctacagcgtgagtgcgcagggtcagcccgcaatcgttggcgatctggatattcagcccgggccgtgcattcaattcgaggatcagcgggcctttttcctggtccagcaccatgtccacgccgatataacccagcccgcacaactcgtagcagccggccgcgagcctcatgaaaccgtcccaattgggcagctgcacgccatccaccgcattggtggtgtcggggtgtttggtgatgatgttgttcagccaggtgccgcgcagcgtcaggccggtggccaggtccacgcccacaccgatcgcgccctggtgcaggttggccttgccgccggactggcgtgtcggcaagcgcaacatggccattaccgggtaacccatcaacacaatgatgcggatatccggcacgccttcgtagctgatgcttttgaagatctggtcgggcaccacgcggtactcgatcagtgcgcggtcgcggtggccgcccagggagtacagcccggtgaggatgctggagatctgatgctctatttcttcatggttgatgagcttgccggacaccgtgcggtagcgcccttcaaagcggtcagccacaacgagaatgccgtcaccgccggcaccctgcgcgggtttgatcacgaagtcgctgcgcccgccgatgatgtcgtcgagcttgtcgatgcctttctcggtggaaatcacaccgtacatttcgggcacgtgcaggccggccgccacggcgcgttccttggtgatgatcttgtcatccaccagcgggtacaggctgcgcttgttgtacttgagcacgtagtcggcgttacgtcggttgatgcccatgatcccccgtgcttccagggccttccaggttttccagaagccgaacattactggtcagccttcaaaaaagccttgaaacgcaccagttcggtcaggcggtagccgcgataacgccccatggccagcatgaaacccaccagaatcagcaggatcgccgggaaggtaaacacgaagtagatcagctccggcacgctcatgatgatgtgcgccagggcggcggcgaacagtgtgcccaccgcgactttgagcgcatggttggcgccgcgttcttcccaggtgatcgacaggcgttcgatggtcatggtcagaatcaccatcgggaacagcgccaccgacagcccgcgctccagccccagcttgtggctgaacaggctgatggccgcgatcaacaccaccacaaaggtcagcaccaccgacagcctcggcaacatctgcaacttcaggtgttccaggtacgaccgcagggacagccccagcgccgtaataatggtgaacagcacaatcccgaagcccagttgcgtctcgcgaaacgccagggcaatcagcaccggggtaaaggtgccgagggtttgcaggccgatgaggttgcgcaggatcagaatcaccagcacgccaatcgggatcatcaccatgatcatgaaggtctgctgggtttgcagcggcaggccatacagcgagtattcgaggaagttggcgtcggtgttctcgtcggtcagcttggccaggcgaatcgcgttcatctcgctgttgttcaggctgaaggtcaccatggctttcttgccgccatcgaccgtgatcaggttttcatcgccggtccaccagagcaggcggtcggccggcaggccttgttcgccggtttccgggttgaagtacagccagtcgttgccattgaagctgcgcaaccacagttccggggtttgcggctggtcggcgacgaggcggatggtgtggactttctccaccggcacgtgggcgatggacaacaacagctcgacgatcttggccttgtgcggtatcgacgggtcacccgccagcaacagcttcacgttgtcgtcgttgaggttgttggtgcgcttgatcgcttcagtgatgaaggtttccacatccgccgagtgctggcggatcggtgccagcagggcttcggcggcgattttttccgggccttccacggcaatgctgtcgcggaaggtcgggcctttgaccttgaccttctcgccgctgtaacgcttggtcagcaccaggcggtaatacagggtctggttgcccttggcacggcgggccgaccaagtgaccttgcggttgccgtcggtgcggttgacgctcacgccgtagttgttcgagataaagctttcattgaggctgacgaagtcgcggctcaggggcggcacgaacatcgagattttcaccgggtccttggggttggcgacaaactcgaccttggcgtcgatgttccacaagtcgtcggtggcgtcctcggtgacggggattcccagcacgaaaatctgataggcggtgaccgaaatacccagcaccaccaaaatggtgatgaggattctcaggtgcagggtcaaagagcgcattcggtttactcggcggtatgagcgtcggtggcgcaggcaggtttgcctgctgcgtatttaagactggggtcgaccagcgcatcaaagcgttttaacgcttcggagccgatcagcagcgggtattggaaagcgctgcggtcagtcaagttcacttcgatgctgcgtaaagcggtgcccatgcagatatccagcgcgatgaccgggcgggcggtgtagtttttgtcctcatcggggtcgtagtcgccggcgcggcgcttgatcttgctcacgcgggccagaggacgttcgatggggtgggaatgggcagtgtcgatggccagataaaaacggacccaggattcgccgtttcgcttgaaacgcttgatatcacgggcgctgagggaggccgtcttggcgccggtgtcgagcttggcggcgacttccaggtcgatgccggccagcttggcgtattcgttcaggccatacacggtcttctcggcggcaacgccaaggcccggtaaagccagcaggcagaacactagaaggaagggcttgagagtcataaatcctgaggcagtgcagtgcaatgttcaattcatggcgactggcattgctgcgcaatctcttgtgcgccgtttcatccaatgatgtcaggcaaaagcggcgggcattctaacatgatgcttttttggcgccagcgctggcaggcggccatgcctctattgagtgcacggggggttattagacgattgtcgacaatgtggatttattctttgactatgagggggcgattcgctagtttttgcggcattgcttttaaaggtgtcgacaatatgctggagcaactggaaaccccagtggtggcgcaagacgattcccagaccatgtccgagaatgtcttccggcgtatccaggccgccatcgtcaagggtgagatcgcccccggcagcaagatctccgagccggaactggcgcgcacttacggcatcagccgtggcccgttgcgcgaagcgatccaccgcctcgaaggccagcgcctgctggtgcgtgtgccccacgtcggcgcgcgggtggtttccctgagccacgccgagctggtcgaactctatgaaattcgcgaatccctcgaaggcatggcctgccgccttgccgccgagcgcatgaccgacgccgaaatcgaagagctgcgccaggtgctgcacacccacgaacgcgacgaagccttccaggccggcctcggctactaccagcaggaaggcgacttcgactttcattaccgcatcattcaaggcgccggtaaccgcaccctgacccaaatgctctgcggcgagctgtaccagttggtgcgcatgtaccgcatccagttttccgccacgcccaatcgcccacgccaagcctttgccgagcatcaccgcatcctggatgcgattgccgaccgcgacggcgaactggccgaactgttgatgcgccgccacatcggcgcgtccaaacgcaacattgcccgtcatttccccggcggcgcccctgaaagaggtgagtcatgagttcgaacaataaaagcacacccggccagcgtttccgtgacgcggtcgccagcgagcacccgctgcaagtggtcggcgcgatcaacgccaaccacgcgctgctcgccaagcgtgcagggttcaaggcgatctacctgtcgggcggcggcgttgcggccggctccctgggtgtgccggacttagggattaccggcctggatgacgtgctgaccgacgtacgccgcatcaccgacgtgtgcgacctgccgctgttggtggacgtggacaccggcttcggttcctcggccttcaacgtggcgcgcaccgtcaagtcgatgatcaagttcggcgcggccgccattcatatcgaagaccaggtgggcgccaagcgctgcggtcatcgcccgaataaagaaatcgtgtcccagcaggaaatggtcgaccgcatcaaggccgccgtggacgcgcgtaccgatgacagcttcgtgatcatggcgcgcaccgatgcgctggcggtcgaaggcctggagtctgcgctggaacgcgccgccgcttgcatcgaggccggtgccgatatgttgttcccggaagccatcaccgagctggacatgtacaaactgttcgcttcccgcgtgaaggccccgatcctggccaacatcaccgagttcggcgctacgccgctctacaccactgaacaactgaaatctgccgatgtttccatcgtgctgtacccgctttcggccttccgtgccatgaacaaggccgccgaaaacgtctacaccgcgatccgtcgcgacggcacccaacagaacgtgatcgacaccatgcaaacccgcatggagctttacgatcgtatcgactaccacaccttcgagcagaagcttgacgcgctgtttgccgccaaaaaataaaccttgtaggagcagggtcgtgtgggagcgggcttgcccgcgatagcagtgtgtcagtcaacgctgatgttggctgatagtcagtcatcgcgggcaagcccgctcccacacaaagcagctcccgcacgctccctgaataactacaaaattggagaagcaccatggctgaagcaaaagtactgagtggcgccggcctgcgtggccaggtggccgggcagaccgcactgtccaccgtgggccaggctggcgccgggctgacctaccgcggctacgacgtgcgcgaactggccgccgacgcacagtttgaagaagtcgcctacctgctgctgtacggcgagttgccgagcaaaaccgaactggccgcctacagcgccaagctgagcaaactgcgtgacctgccgcaagcgttgaaggaagtgctggagcgcatccccgccgacgcccacccgatggacgtgatgcgcaccggttgctcgttcctcggcaatatcgagcccgagaaggatttcagcgcgcagcatgacgtcaccgaccgcctgctcgccgccttcccggcgatcatgtgctactggtaccgcttcagccacgacggcaagaaaattgactgcgtgaccgacgagccaagcatcggtggccacttcttgcacctgttgcacggcaagaagccgagcgagctgcacgtcaaggtcatgaatgtttcgttgattctttacgcggaacacgaattcaacgcttcgacctttaccgcacgggtgtgcgcttcgaccctgtccgacctgtattcctgcgtcaccgccgccatcggttccctgcgcggcccgctgcacggtggtgccaacgaagcggcgatggagatgatcgagcgtttctcgtcggctgaagaagcggtggaaggcaccctcggcatgctggcgcgcaaggacaagatcatgggctttggccacgcgatctataaagacagtgacccgcgcaatgaagtgatcaagggctgggcgaaaaagctggctgacgaagtgggcgacacggtgttgttcccggtctcggaagccatcgacaagaccatgtgggaacagaagaaactgttccccaacgccgacttctaccatgcctcggcgtaccacttcatgggcattccgaccaagctgttcacgccgatcttcgtgtgctcgcgcctgactggctgggctgcgcatgtgttcgagcagcgcgcgaataaccgcatcatccgtccaagcgccgagtacaccggcgttgagcagcgcaagttcgtgccaatcgaacgtcgctgaatgggatgaactgagcacactggccaatgtgcttttctgtgggagctggcttgcctgcgattggatcaactcggtgtacctgtcacaccgcagtgatgccatcgcaggcaagccagctcccacaggaagccaggccagtgtcgacagttcgccctgtgaacctaccgtgaccgagtcctgacgatgaacactgaatttcgcaaaccgctccccggcagccgcctggattttttcgatgcccgcgcggccgtcgaggccatcacccccggcgcctacgccacactgccttatacctcccgcgtgctcgccgaaaacctcgtgcgccgctgcgacccggccaccctcaatgcgtccctgagccagttgatcgagcgcaagcgcgacctcgacttcccctggtttccggcgcgcgtggtgtgccacgacatcctcggccaaaccgcgctggtggacctcgccggcctgcgtgatgccatcgccttgcaaggcggcgacccggcccaggtcaacccggttgtgccgacccaattgatcgtcgaccactccctggccgtcgaagccggtggggctgacccgcaggcgtttgagaaaaaccgcgccattgaagaccgtcgcaacgaagaccgtttccactttatcgagtggaccaagaaggccttcaagaacgtcgacgtgatcccgccgggcaacggcatcatgcaccagatcaacctggagaaaatgtcgccggtgatccaggtgcgcgacggtgtggctttccccgacacctgcgtcggcaccgacagccacaccccccacgtcgatgccttgggcgtgatcgccatcggcgtcggcggcctcgaagccgaaagcgtgatgctcggccgcgcctcgtggatgcgcctgccggaaagcgtcggcgtggagctgacgggcaagctgcaaccgggtattaccgcgaccgatatggtgctggcgctgactgaatttctgcgcaagcaaaaagtcgtcggcgcgtggctggaattcttcggtgaaggtgcctcaaacctgaccctcggcgaccgcgcgaccatctccaacatggcccccgaatacggcgccacggccgcgatgttctacatcgaccagcagaccatcgcctacctcaaactcaccggccgcgaagacgaacaagtcaccctggtggagcagtacgcacgccacaccggcctgtgggcggatgacttgaaaggtgcacagtacgagcgcggcctgaccttcgacctgtccagcgttgtgcgcaacatggctggcccaagcaacccgcacgctcgcgtcgccaccagcgacctggcggccaaaggcatcagcggccagtgggaagacgtgccgggccaaatgcccgacggcgcggtgatcattgcggccatcaccagttgcaccaacaccagcaacccgcgcaacgtgatcgccgcaggcctcttggcacgcaatgccaacaagctcgggctggtgcgcaagccgtgggtcaaatcgtccctggcgcccggttcgaaaaccgtggcgatgtacctcgatgaagccggcctgaccaccgagcttgagacattgggttttggggtggtggcgtttgcctgcaccacctgcaacggcatgtccggcgcgctcgacccggtgatccagcaggaaatcatcgaccgcgacctgtacgccaccgccgtgctgtcgggcaaccgcaactttgacgggcgcattcacccttacgccaagcaggcgttcctcgcttcgccgccgttggtggtggcttacgcgattgccggcaccatccgtttcgacatcgaaaaagacgtgctgggcctggacgccaacggcaaggaaatccgcctgaaagacatctggccgagcgacgaagagatcgatgctgtggtcaaggcctcggtcaagccggagcagttccgcaaggtctacattccgatgtttgccatccatgaggacaccggcccgaaagtcgcgccgctgtatgactggcgcccgcaaagcacctacatccgtcgcccgccgtactgggaaggcgcgctggccggggcgcggccgctcaagggcatgcgcccgctggcggtgctgcctgacaacatcaccaccgaccacctgtcgccctccaacgcgatcatgctggacagtgccgccggtgagtacctggccaagatgggtttgccggaagtcgacttcaactcctacgccacccaccgtggcgaccacctgaccgcgcagcgtgcgacgtttgccaacccgaaactgttcaatgaaatggtccaggaaaacggcaaggtcaagcagggctccctggcacggatcgagccggaaggccaagtcacgcggatgtgggaagccatcgaaacctacatggagcgcaagcagccgctgatcatcattgccggtgccgactacggccagggctcatcccgcgactgggcggccaagggcgtgcgcctggccggtgtggaagcgattgccgccgaaggattcgagcgtatccaccgcaccaacctggtgggcatgggcgtgttgccgctggagtttttgccgggcaccgaccggcattcgctgaacatcgacggcagcgaaacctatgacgtgctcggcgagcgcaccccgcgtgccacgctgacactggtgatcaaccgcaagaatggcgaacgtgtcgaagtgccggtgacctgccgcctggacaccgctgaagaagtgtcgatctacgaggcgggcggcgtgttgcaacgttttgcccaggacttcctggaatcggcggcgaccgcttaaggggttaaccatgacacaggttgcgcaaatcaagatccccgccacttatatgcgtggcggcaccagcaagggcgtgtttttcagcctcaaggacctgcccgaagcggcgcaggtgccgggcgcggcgcgcgatgccttgctgttacgggtgatcggcagccccgacccctacgacaagcagatcgacggcatgggcggcgcgacgtccagtaccagcaaaaccgtgatcctggccaaaagtacccgcgccgagcacgacgtggactacctgttcggccaggtgtccatcgacaagccgtttgtggactggagcggcaactgcggcaacctgtcggcggcggtgggttcgttcgccatcagcgcgggcctgatcgacccggcccgcgtgccgcacaacggtgtggccgtggtgcgggtgtggcaggccaatatcagcaagaccatcatcgcccacgtgccgatcaccgacggtgcggtgcaggaaaccggtgatttcgaactcgacggcgtgacctttccggccgccgaagtgcagctggaattcatggacccggcggcggaagaagaaggcggcggtggttcgatgttccccaccggcaacttgatcgacgacctggaggtgccgggtgtcggcactttcaaggccacgctgatcaacgcgggcatcccgacgattttcatcaacgccgaagacctcggctacaccggcaccgagctgcaaggcgcgatcaacggcgacccgaaagccctggcgatgttcgagaccgtgcgcgcccatggcgccttgcgcatgggcttgatcaaacatctggacgaagccgcccagcgtcagcacacgccgaaggtggcgtttgtggccaagcctgcggattacgtggcgtcgagtggcaaggcaatcaaggctggtgatgtcgacctgctggtgcgcgcactgtccatgggcaagctgcaccacgccatgatgggcacggcggcggtggcgattggcacggcggcggcgatttccgggacgttggtcaacttggcggcagggggcgttgagcgtaacgcggtgcggttcgggcatccgtccgggaccttgcgtgtgggcgctgaagccagccaggtggacggcgaatggggggtaaaaaaagccatcatgagccgcagcgctcgagtattgatggaaggtttcgtgcgcgtgcccggtgacgcgttttaactatttataacgtcccctgtgggagaggacttgtgtgggagctggcttgcctgcgatggcatcccctcggtttaaccgagagaccgagttgcccgcatcgcaggcaagccagctcccacacaaatccctcccacagaggatctctattccaaggcagacagccaagatctgcttccaacaaccgtgagcccgaggactaaccccaacccattttttggagcactgccatgagcgccaacgtcgaccagaacaaccgccccgactacgaccaggttttgcaggacattgccgattacgtcctcaactaccggatcgactcccgggatgcgctggacaccgcccgcaactgcctgatggataccctgggttgcggcctgctggccctgcgtttccccgagtgcaccaagcacctggggcctatcgtggaaggtacggttgtacccttcggcgcgcgtgttcccggcacttcgttccgtctggacccggtcaaggctgcgtgggacatcggctgcatcgtgcgctggctcgactacaacgacacctggctcgccgccgagtggggccacccctcggacaaccttggcggcatccttgccgtggccgaccacctctcgcaaaaacgcgtggccaatggcgacgcaccgctgaccgtgcgcgcggtgctggaagcgatgatcatggcccacgaaatccagggcgtgatcgcgttggaaaactccttcaaccgtgtaggtcttgatcacgtgctgctggtgaaagtcgcctccaccgctgttacagccaagctgatgggcgccaatcgtgagcagttgcttgccgcgctatcccatgcgtttgtcgatggccaggcgttgcgcacttaccgtcacgcgccgaatgccggttcgcgcaagtcctgggcggcgggggatgcctcgagccgtggcgtgcgcctggcggatatcgcgctgcgcggcgagatgggcattcccggcgtgttgagcgcgccgcagtggggcttctatgacgtgttgttcagccacaccaacaaagacctggcgctcaagcccgaggacaagcgcgcgttcagcttgccccagccttacggcacttatgtgatggaaaacgtgctgttcaagatcagctttcctgccgagttccatgcgcaaacggcgtgtgaggcggcggtgacgttgcacccgcaggtcaagcatcgtctgcacgaaatcgagcgcatcgtgatcactacccacgagtcggcgattcggatcatttccaaggtcggccaactggccaacgccgcggaccgtgaccactgcctgcaatacatgaccgctgtgccgctggcgttcggcaacctggtggccgagcagtacgaagatgatttccacgccgcgcacccgatcatcgacgagctgcgcggcaagatggaaatcgttgaagacctgcgctacagccgtgaatacctggaggccgacaagcgctccatcgccaacgcggtgcaggtgtttttcaaggacggctccagtaccgaacaagtggcggtggaatacccgatcggccatcgccgccgccgggcggatggcattccattgctggaagacaagttcaaggccaacctggccacgcggtttaccgcgcagcgcagtggggagatttttgcgttgtgcaaggatcaggcccggcttgaggctacgccggtgaaccgatttatggacctgttcgtgatctaaataacaacgcagtcaatgtgggagctggcttgcctgcgatagcggtctatctgtgccatctgtgtggctgacccaccgctatcgcaggcaagccagctcccacattttgttctgtgttgctcgaggcaattacatactgccttccacatcatccaggctgaacgtctcggtgtggtcgtcatacgaaaaaatctccgcataccgcccccacgccaccacgctttccagggttttctccacaaacgcctcggtcatcgagtcttccagctcctgttcgaaacgcacccgtggcgcacggtggccgctgcgttccagcagcacctgatgaatccgcgcagccagcggcacatggcggatcaagtgctcggcgaacagggttttacgttcctgagtgccgtagtcggcgaacagcttgccggcgtcggtgagggtgatgtcggcgcctttgagttcggcaaagcccaagtgctccagcatctcggcgaccgggaacaggtcatcgacttccagcaaacgtcgctcggccacggtcggcagaccggcgtgcccgttgtagggctcggcagcgagggtttcgatcaggccggccatcaggttggtggacacttccggcaacaggctgcccattttcagctcgggcaggccacggctggcgtcggcgctgcgccggtcggtcatcagcgcgtagatgtcgtcgaccatctgccggaacgtcgggtcaaggcggttacgcgggtgggcaaacggcactttgatttcggcgaccacccggccggggttggaggacagcaccagaatgcggtcgcacatcagcaccgcttcttcgatgttgtgggtcacgatcaggatcgacttgatcggcaactgcttgccgctccacaaatccagcaggtcggtgcgcagggtttcggcggtgagtacgtccagcgccgagaagggttcgtccatcaacaacagcgtcgggttgaccaccaggccacgggcaaaacccacgcgctggcgcatgccgccagacaattcgcgggggtaggcgttttcaaaaccgtcgaggccgatcaagtcgatggcggcgagggcacgtcggcgggtttccttgcgctcgacctgcaaggcttgcaggccggcttccacgttttccagcacggtcagccacgggaacagggcaaaggtctggaacaccatggccacgccttcggccgggccgttgagtggcttgccctggtagcgcacatcgcccgaggagggctggatcagcccggcgatgatgcgcaacagtgtggacttgccggagccggagcggccgagcatgccgacgatctcgccttcgtgcaggctcaagtccacgccgctgagcacttgcagctcgtctttgcccttgccgaacacccggttcacgtttttcagcgagtaaatttccggggtgtcgacagtgtgttcagtaggggtagtcatcacggcgaatcccgtcaattcaaacgaagtttgttttcagcgatggcgtacatcggtcgccagaccgcacggttgaacgccaccacaaagatcgacatcaccaccacgcccagggcgatcttggggaagtcgccggcggcggtggtttgggcgatgtaggcgcccagcccgtgggcgaccacgttgtcctggccccacgagacgtactcggacacgatgctggcgttccacgcgccacccgaggcggtaatcgcgccggtgacgtagtatgggaaaattcccggcaacatcactttgcgccaccacagccagccgcgaatgcggaagttcgcggcggcttccttgaagtcattcggaaacgcgctggccccggcgatcacgttgaacaggatgtaccactgggtgccgagtacgatcagcgggctcagccagatgtccgggttgaggttgtagtgcaggatcacgattacaaacaccgggaacagcaggttcgccgggaaggcggcgaggaactgcgccagtggctggatcttttccgccaggcgtgggcgcaaaccgatcatcacgcccagcggcacccagatcagcgaggcgatcaggatcagcccggccacccgcagcagcgtgatcaggcccagtacaaacacatggccgacttcggcgaaggtcacttcggtgccgacgtacaacacgatgtgatacagcgcataggcagccatcagcgcaatcgccgtgccccagactacatcgatcactttcgaggctgccggggtttgcgcaggtaatgccttgagcgcaccgccccccaggctgaaacgcttgttgccgatacggctgatggcgcgggtgatcgggcgcaggatgcgctgcacgacgcgcgtgcgctggatcaggttcagcagccaggattgcggcgcggcgccttgtgaggcggtggtttccatgcggaatttgtcggcccaggccaccagcgggcggaacaggaactggtcgtagatcaggatcaccgcaaccatggcgaggatcacatagcccacggcgtgcaggtctttctgggcaatcgccagggcgagatacgagccgacgccgggcagggtgatggtcttgtcgccgacggtgatggcctcggaggcgaccacaaaaaaccagccgccggacatgctcatcatcatgttccacaccaaccctggcatggcgaatggtacgtcgagcttccagaatttctgccagccggaaagccgcaggttggtcgatacctccaccaagtcatggggcagcatgcgcagcgactggtagaagctgaacgtcatgttccaggcctggctggtgaagatcgcgaagatcgccgcgaactcggcgcccagcacgcggccgggaaacagcaacaggaagaacgtcacggtgaaggagatgtaaccgagcaccggtaccgactgcaggatgtcgagcacgggcaccagcagtttttcggcgcgccggcttttggcggccagcgtgccatacaaaaaggtaaacaccagcgccgccaccatcgccgcgagcatgcgcaaggtcgtgcgcatcgcgtattccggcagattggccgggtcgagggagatgacttcgctttgcaaggtggcgatgggcgcccaggtttcgcgggcggtaatcgagaaaaacagcagaaaaccgatcaccagcggcagggcgaccaggtcccagcggttaggcagcaagcgcagggtcgacgccggcaggtagtcacgaaagactcgattcataggcaattgctcataggcagtcagtcctgcggcgttcaggttcgcaaaagcgtagtgggtgtgagcttagcttctcttcaagcactcaccgagaaggggcgggcgcgcttctccatgagccaggggcagcgcatctgggggagatgtgctgttggcggaattgtacgtttctaaatgttacaagcgcataaatttgctgtcagtttcctgtacgaactgcgacctgttgacagcccggttttggatcggcccccattcaaatcgctggcctgcctgctcgctggcgaaatacgcagttattcaagcggctcccgtccatggaacctctttcaggtgagtgccaataggaaagcaggtgaccggttaaaacaggtcatccggcattgcgattttaatatctgaatctgagaaggcgttctatgactaccgtgaacactcacccacctgtaccttacaccgcaggatatgaggcacctcaaagctcagcacctgcccaccaggattacaacaacgaggcgtctggttacgcaggtacgcaggcctattccgccccgtcccgccctccggtgacacccgaacagcgcgggccgttttcgagccacagcgggatgatcaatccacagccgccgcagggggctgatatgtcgggcgagctagccgaagtgtcccaaaaaaaccagaatcttctcgacaagtacgcagcgctggccacaaaaatccagacgaagatccctgaagtcgtcacaaaaatagggacactggagcaacagatccatgcctcacgtaaacagactgaaggcacgtccggtgcaccaggctctacgccacagaaccgtcttgcggatgctcagaccgtagcgcctgaaacacctgaaatatctgacacgccgggcacgcaaacaactgagcaaacccacgctgccagctttgcccagttaaccgaagatatctcccagcttaaaaatgcactcggcgtgttaatgaagaacttgaaggatgcaatgacagtactgactgacaagcttgatgaactgactcaattgctcagccagagtgcaccgcaaaaccagaatcagcctccgtcggcaggcaccactgaagctgcgatatcgaacgacatggcgcctgaaacgatgactccaccgcaagctaaaaagcccgctccgaccaatgaatcagtagagtctgctcctggcacgattgagtacttcaagcaggaaaaccaaaagcttgagattcaaattgatgagatgacggcttactttgagcaaatgatgtcaacccttgaggaacagatcaaaaccttgacccggcaaattgaagcccaggcgaaatagggcgataccggaccaaccagtgtgatgggcgtccttcacactggcgtttttcagttttaatccgttactcaaaccgcaggatcacccggcggttgtgcttgctcttcttctcgatcttttcgcaaaacacccgaccaatttcctctgtgttgaccacgtgggtgccaccgcacggctggatgtcgattccgctgatttctatcacccgcaccgagccctggattaccggtggcgcgacggcctgggtgcgggtgatctgcagcagcgtggagtactccgaagcgggcatcgacaaggttgtcaccgcgtgggcctgttcgatcagggcgttgaggtcacgggtgatgctgtctttgtcgagcgtcatttccggcaggtcgaaatccaggcggcctttatcggcgctgatgctgcacccggtcacaggtgcatcgatgatcgagcacaacaagtgcaggcaggtgtgcatcttcatgtgctggtagcggcgctcccaatccaggcccgcgtccacctgcacgccggccgtcaattgttcggggcagtgttcaacctgatgccagatgatcgagcgcaacaccgggtcgcgcacggtgcccgtcaccgccacccgcgtaccgtcgggcaaggtcaggtggccggtgtcgccgggctgcccgccgccggtgggatagaacaaggtgtgctccagggcaatgccgtgttcgctgacggcaatcacccgggcactgaaggcgttctggtaaggcgcgctgtcaaatagcgccagggtttccatggtgtgcacagacatgttcaacctccgacaatcaatgggctggcttgcaacaggtgacgcaccattgcgctcaagccagggggggagagcagggtgatttcaaattccgggccactgactttcaggttcagcggcaggcgcggcagttgctcacctatatccaggcgccgcagacgaaattgcaggtgatgacgttctttgacggtgggctccagcatcaacccctgcaaggggtgaaagtcggcgtccagcaccgtgaccttgtggctgccactgacctcgccaaccacgtgcaaacgctcgtccaaggcaaaggccccaaggtagctgctttggtctgactcggtgttcttctgcagctgaacctggttgaccaccttgaccttggtacccgccggtacatcttgcgtgatgacacaggacgggctgataaacacgttgtcgccgatcagtacatagcccagcacgcgtgcaccggagcccacctccacattgttgcccagtcgcgggtggcgcttgccgtccgggttgttggcgatcccccgtgcacccagggtgacaccgcagaggatgtagcagtcgttgccgatttcgcaggtctcgccgatcaccgtgccgtagccgtggtccagtacaaaacgccggccgatgcgcgccgccgggtgaatctcggcgccggaaaggatcttgccctggttactgagcttgagggcgatgcgcgaaaacacgccgttggccttgtcggggaaattccacaccaggtgcgcaaggcggtagaacaacaccgccttgaaggaggcgtaggattccagtatcagctcgccgcgcccgcgggatgccggatcacgataggcataggcgatcaagtcttcggccacggcctgcgcggcgttctggatcagcggtgccaagtgtggctccagctgcttcatctgcgcaggcgtcaaggtcttgatgaggtgggtgatcaactcatcgtgcagctgttgcatgtcgataaagccccccatggaggcacccccgcattctggtctgttgggaaaccgcttattcgaaactgggcaggtagccgtcggcattgtcgtagaccactgtcagcaccaccgtttcgggcggcagttcgggggcaagttgggcaatggcgaccatattggcggcggacgacaaccccaggctgatggcgtcggtgcgcatgatgcgtttcatcatgtcgatgcacgcctggcgcgacaccttgagcatgccatccagcacgttcacgttgagaatgctggggatcaagccgatcgacaggccctggatatggtgcggcgcatgctggtctttcagcaggtcgcattcctccggctccacgcccatcacacgcagggctggccaggctgttttcagggtttcgccgataccggtgatatgcccgcctgtgccaatgccgctgacgaaatagtccacgcgcagatcaccgaaggctcgcaggatttccggcgcggtggtgtcgcggtgggtttgcggattggcgccattgcgctgctggttgagcatgacgtagttggggttttccagctgcagctccatgcacttttcgccatgggagttgttgcccagacggctgtccgagagcactaccctggcgccgtacaggcgcagcagcttctgcttttcggggctgtagttgtcgggaattaccagcaccactttgtagcccagcacattgccggccatcaccaggccgatgccggtgttgccgccgctgggctcgatgatggtttgccctgaatcgcgaatcagcacgccccgtcgctcggcgtcgaggatcatgcccagggcaatgcgcgccttgtggctgccgccggggttgagggattcaagcttggcgtacacctcgatgccgaggtcttcggaaaactgtgccaggcgtacgatcggcgtttggccgatcacgtcgagaatggagttatgcagcatcggtcagcccccggctcagtacaacggcatgtcgggttcgacatcgcggacccaatgcttcatgccgccctgcagcaccttggtattggcaaaacctgcggccagcagtgtgctggcggcttgctcggcgcgggtgccggcgtagcagatcaggtagtgggtgttgtcgcggctgaggctgtcgagttgcctgtccagctcggccagcgggatatgcaccacgcctggcaacttgcacacctcaagctcactggcgtcgcgcacgtccagcagcacgtcggcgctgcggtggtggtcgagcacttgtttgagtacgcgcggtttgatgtagcgctcttcggcgagtgccggccggctcggtacggcatcggcgcagagggtcggggccagggtttcgctgtggcgcagctccgagcagcaggggcagtcggggcgacgcttgaaacggatttcgctgaacttcatcgccagggcgtcgaagcgcatcaagcggccggacaagggctcgccaatgccgatcagcagcttgatggcttcggtggcctgaatcatcccgaccacacccggcagcacgccaatcaccccgccggcgctgcagttgggtgcaagctctgcaggtggcgcggaagggaacaggcagcggtagcaaggaccgcctttgtagttgagtacgctgatctgcccgtcaaaccggtaaatggcaccgtagaccaagggtttgccaagctgcacgcaagcgtcgttgaccaggtagcgcgtgtcgaaattatcggtgccgtcgatcaccaggtcgtaggcgccaaccagctccaaagcgttgtcggcgttcagcgcggtgttgtgcgcattgatctgaatatggcggttcaagtcctgcaggcgctgtttggcggaatcgaccttgggcatgcccagcgtgctgttgccgtgaacgatctggcgttgcaggttgctgctttccaccacgtcaaaatccaccaacccgagggtgccgatgcccgctgctgcgaggtacaggctgatgggcgagcccaggccgccggtgccgatgatcagcaccttggcctttttcaggttcaattgaccttcgcggccgacgcccggcagggtgatgtggcgtacgtagcgctgtacttcttcattgctcagggcgtccacgtccataccgccggaggtggcgagcagcacttcgattctggccttttgcggcagtggctcgtcggcgcctatcaattcttcttcagcggtgaacaggaagtgttccttgagctggttgttcttttcgtgaaacaggtgctggcgcagctgcgggtggctgctgcagaggttttcaatgacttcgcgcaatgtcgatccggtaccctcgagggtcgattccggcagcttggccacgcgaaccagaatgtcggggaaagagacagcgttcatggacaactccgtgtgcaggtcgttgaaagggttgagggcgaaatgcttgccatcccaggcaaacagcttggagcccagggcctggccttgacgaacatccaccaccagatagctcacggggtagatcggttcgcccaggaacagtgccttgtcctggtcttcttcactgaaataggcgccgacatccgggtgggagtggtagatcaccaccaccgggttttcgctgcgaaacgccttgttcatcagcaacgtgtcggctaccgaaaaggtatagccgttggccgcgttgcgtgggtacatctgcgggtccttgcggtgcagttcgttctggatattgctgcccaggtacacgctgccgtcggcgaagacaaaaccacagcattcctcgggatagctgcggctggcgtgggcgtagatctgttccagggtttttgggcggaggacgtccatgtttctctcgcgttgttcatgttgacggggctggagggtcaatttttcttggccaggagtttttcaatcggcaacttggtgatcgcaaagccggccaggaggatggccgaatagagcatcagatcgcgggaaatcgccacgccttcataccaggcgccgatgatcaccgcgaacactggaaagatgatgaacacgaacgacaggatgatcgggctcaggcgcttgagcagcatgaaatacacgatgaaaccgcccaccgacgctaccagccccaagtaaaacagcgcgctccaggagcgcagggtgatgttttcgaaggttggtgtttcaaaccacaggccggccacgaacagcatcaacccggcgatgccgatgggcagtgtgttgtaggtgatcacgctgatggcactgcctttttgcttggtaatgacatagcacaaggcatgcatgatcgcggcggtcaggattgccagcacgccgaagaactcggcgtggtccaggtgcaggccctggctcttgatgatcatgtacaggctgccgaaaccgatgccgatgccgaccacctgggaaaagtagatgcgctcacgcaggaacagcgcggagaagatcaggatgaacaccggcatgcagctgaagagcagggcggtgaggccggacgagacatgcatctcgccatagttgagcaggtaatacggaacgctgaagtaggaaagggtcacgaacacgaagaaccagcggctttcccgcggaaacagaatgggctcgcggcgcaccagggcaaaacacagaaacagcgggaaggcgatcagaaagcgcaagcccgcggacgtcagcggcggcacgctctcgacggcgatcttgatgcccagccaggtggtaccccaactcaggcacacgataagaaacatcacgctggtgatcagcccggccagccactgtttctgggtttttgtttttgttgtgttttcgagaacggcggacattggcatcgtttattgcttccctgagccggaattgaactctatattgactgtgtattaagttgtttcatccggtgattgaacccgtaaaagcacactattagggccaaagatgactgtcaaaacaaatattgacatggtgtcaattatgcgtgaggggttgtccagcgggcagggcgtgaagtacaagcgcctgtccgatgtcatggaacggggcatccttgagggcttgattgaaccgggacgaaaactgccgccccaccgggtgctgtccgacaacctgggtgtgaccatcggcaccatcagccgggcctacggcgagttggagcgcctggggttggtggtggcgcgggtaggtgacggaacattcgtgcgcaagcgtgggatggagcgtcagcgcgatgaaggttttcgcaacttcagcgaggagccgcgccagtatttcgacatgagccgcaacatgcacattcccgggcaggagacagtgtttctggcccaaagcttccaaaccctgtcgaccaatgccaagtttctccaggacatcagcgcctacaccccggacgccggcctgccgcgctaccgtgaagcgggcgcacagtggctggtgcagcgtgattttcacccgattccggagcaagtcatctgtgtcaatggcggccagcatggcttgctctgctcgatgatggcgctgctgcgtgcgggcgatacggtggtcaccgaacagctgacctacccgggattgatcaccgctgcgcgcatgctcggcgtgcggctgatcgggctggagatggatgaagaaggcgtgctgccgggcgcgctggatgaagtctgtcgaaatcaccgggtttcagcgttgtactgcacaccgaccatccagaacccgaccacggcggtcttatcgatcccgcgtcgggaggccttggccaaagtgtgtcgcgaacacaacctgctgattcttgaggacgaagctcacggtgtattggtggaagaccggccgccgcccctgagctttttcgcacccgaacgtacgattttgatcagcagtttgagcaaggcggtgtctgccgggttgcgggtgggctatgtgcatgcgccgcctgcgctggtcagccgtatttcagccgcgctgcgctcgacctgctggatggccacgccggtgaccctggagttggcgacccagtggattgaaaacggcacggcggagtacctgctgcgccagcaaatcaacgagatcagccggcgcaaggcgttggtgcgcgacttgctgagtggcctgcaataccgaacccacctcaacagcccgcacttctggattgaagtgccggagccttggcgtgcgtcggaaatcgaggcggagctcaagcagaataattacctgatcgccaccgccgaggcgtttgccgtggggcagacggcggtgccgcagtttattcgggcgagcatttgtaatacgtcgggggatgatcagttgttgaaggaggggtttgatgcgttggccaccgccttggggcaggggggcggcaggtttcatctgtaggcaggtttaccgcgttatcgttcatcgcaggcaagccagctcccacattttgatcggtgaacacattcaaaaggtgggagctggcttgcctgcgatgaggccggccctggcaaaatattacttgaaccgccgctccacacctttctccaccagaatcttcgccgatatctcttccaccgaaaaatgcgtggaattgatgtgcgcaatgttctcgcgacgaaacagattttccacttcgcgcacttcgaattcgcactgggcatagctggagtaacggctgttgggcttgcgctcattgcggatagccgtcagccggtccgggtcaatggtcaggccaaacagcttgtgtgagtgcgcgcgcaaggcggcgggcagcgtcaggtgctccatgtcatcttcggtcaacgggtagttggccgcgcggataccgaactgcatcgccatatacaggcaggtcggcgtcttgccgcagcgggacacgcccaccaggatcaaatccgccttgtcgtagtagtgcgtgcgggcgccatcgtcgttgtcgagggcgaagttcaccgcttcgatacgctccatatagttggagttgtgcccaatggaatgggactttcctacggagtaagacgagtgttcactcagctcctgttccagtggcgccaggaacgtggagaaaatgtcgatcatgaaaccattggaggttgcgaggatctcacgaatgtcttgattgacgatggtgtcgaaaatgatcgggcgcatgccgtctttttcggccgccagattgatttgttgtaccatggcccgcgctttgtccacgctgtcgatataaggccgcgtgaatttggcgaaggtaatgttttcgaactgcgcgagcaggctttgacccagtgtttcggctgtgatgccggtgccgtcggagataaagaaagcagatcgtttcatttgagccctgggccttaagctgatggcgaatcttggatatgataggcgcgattttgccgtcccgcagtgggccgcattctcacttattttccaggtccaggccacaaacgccgcagaaagctcctgttgagcagccggcgccctgagcttttccaacacagttagtggagagatcaccttggtagagtacgtagtttccctcgataagctcggcgtccatgatgtagagcatgtggggggcaagaacgcatccctcggcgagatgatcagtaatcttgcaggcgctggggtctcggtgcctggtggtttcgccaccacggcccaggcctaccgcgacttcctcgagctgagcggcctcaacgcccagatccacgccgcgctggacgccctggacgtcgacgacgtcaatgccctggccaagaccggtgcccagatccgccaatggatcatggaagccgagttccccgagaagctcaacgaagaaatccgcaccgccttcgccgcactgtcggccggtaacccggacgtcgccgttgccgtgcgttcctcggccaccgctgaagacttgcccgacgcctctttcgccggccagcaagaaaccttcctgaacatccgtggcgtggaaaacgtgatccgcgcggccaaggaagtgttcgcctcgctcttcaacgatcgcgccatctcctaccgcgtacaccagggtttcgaccacaagctggtggccctgtctgccggtgtgcagcgcatggtgcgttcggaaaccggcaccgccggcgtgatgttcacgcttgataccgaatcgggcttccgtgacgtggtgtttatcaccggcgcctatggcctgggcgaaacggtcgtacaaggcgcggtcaacccggacgaattctacgtccacaagcagactcttgaggccggtcgcccggcgatcctgcgccgcaacttgggcagcaaggcgatcaaaatgatctacggcgacgaggccaaggccggtcgctcggtgaaaaccgtggatgtggacaaggccgaacgcgcgcgtttctgcctgaccgacgctgaagtcagcgagctggcgaaacaagcgatgatcatcgaaaagcactaccagtgcccgatggacatcgaatgggccaaagacggcgacgatggcaagctgtacatcgtgcaggctcgcccggaaaccgtgaagagccgtacctcggccaatgtcatggaacgctacttgctcaaggaaaccggcaccgtgttggtagaaggccgtgccatcggccagcgcatcggcgcgggtaaggtgcggatcatcaaggacgtgtctgaaatggacaaagtccagccgggtgacgtactggtttccgacatgaccgacccggactgggaacccgtgatgaagcgcgccagcgccattgtcaccaaccgtggcgggcgtacctgccacgcggcgatcatcgcccgtgagctgggcattccggcagttgtcggttgcggcaacgcgacccaactgctcaaagacggccagggtgtgaccgtttcctgcgccgaaggcgacaccggtttcatctttgaaggcgagctgggcttcgacatcaagcaaaactccgtcgacgccatgccggacctgccgttcaagatcatgatgaacgtcggtaacccggaccgcgcctttgacttcgcgcagttgccgaatgccggtgtgggcttggcccgcctggaattcatcattaaccgcatgatcggcgtgcaccccaaggcgttgctgaactacgacggcctgccgctggacatcaaggaaagcgtcgacaagcgcatcgccggctacaacgacccggtgggcttctacgtcgagaagctggtggaaggcatcagcaccctggcggcggcgttctacccgaaaaaggtcatcgtgcgcctgtcggacttcaagtccaacgaatacgccaacctgatcggcggcaagctctacgagccggaagaagaaaacccgatgctgggcttccgtggcgcctcgcgttacatcagcgaatcgttccgtgactgcttcgagctcgaatgccgcgccctcaagcgcgtgcgcaacgagatgggcctggacaacgtcgagatcatggtgccattcgtgcgcaccctgggcgaagcgagccaggttatcgacctgttggcggaaaacggcctgtcccgcggcgaaaacggcctgcgcgtgatcatgatgtgcgaattgccgtccaacgcaattctggccgaagagttcctggaattcttcgacggtttctccatcggctccaacgacctgacccagctgaccctgggcctggaccgtgactccgggatcatcgcccacctgttcgacgagcgtaaccctgcggtcaagaagctgctggccaacgccatccaggcctgtaacaaggccggcaagtacatcggcatctgcggccagggcccttccgaccacccggacctagccaaatggctgatggaacagggtatcgaaagtgtttcgctgaaccccgactccgtgttggaaacctggttcttcctcgcggaaggccaagcgtccgcctaaggtcgacacgtcaaaagtgccggtcactcgccaagggtgaccggcattcttatctgtacagggcgggaatcctcgcggacgccgcccttttttgtgcaagagcattatgcaaagcagcagcaacttgtttcccgtcgccctgatcagcgctgaacgtcgtggcgacctgagtgaagatgtgtatcgcctcaagcccggtaacagccccgacggcaccgtcgagttggccgtgacccgtttgggcctggcggatgtcccggaaaaccggggcgcgccggttattttgttgcacggcagtttttccaaccggcgcttttggtattcacccaagggcatcggcctgggcgcttatctggcacgtcaggggttcgatgtgtggattcccgagatgcgcggccatggcttgtccaagcgcaatcagcattacgccaacaatcgtgtggcggactatgcgcgctacgacttgccggccattggcgccttcgtgcgcgagcaaagcgggcaggtgccgcattgggtcggccattcgctcggcgccaccacgctggcggcggcgcttggcggccagcaccttggcgcgcctgcggtggcatctgtggcgctgtttggttgccaggtcagccgtacccattggccgctgaaaattccaccggtggagtggggcagtcgcctgctcttgaagcgctttgcccacgtctctggcccgcgcttcaagcgggggccagaggacgagccggcaggcgtgatgatcgaggccatgcgctggaacggcttgtttggccgttttggtgattcgcagcgggattggtggaaaggcctggccgaagtcgatgtgccactgctggccgtcagcgcggctggcgatcagcaggacccggactgggcgtgccgcaagctgttcgaacaagtcggttccgagcatcgccagtacctgtgtctggggcgcaagcaaggttttaccggcgatttcgggcatgttgagatgctggtcagcaaagccgccacaaccgaagtgtggccgttggtggagcggtggttgaaagatccgctgacacctttattcggggcacagtccgaggtggcggcggccgattgacgaagggctctgccaagggcgtttcgcttgttcgtggttgcggctaagatatgacgcgttaaacgcttctggtcatattcagtcgcgcagtggctattgcgttgcggcgaggcgggtgggatgttccacacccgcattctgtggcgcatccttcgaaagacacttctttgacccaaaggaatttttcaatgaaccattacgtgacccccgacttgtgcgacgcctacccggacctggtgcaggtgctggagccgatgttcagtaatttcggcggccgggactccttcggcggcgaaatcgtcaccatcaaatgcttcgaagacaattccctggtcaaggaacaagccgaccagccgggcgccggcaaggtgctggtagtggatggcggtggttccctgcgccgcgcactgctgggggacatgatcgctgagaaggccgctaaaaacggctgggaaggtttggtgatctacggctgcattcgtgacgtggacgtcattgcccagaccgacctgggggtgcaggccctggcgtctcacccgatgaaaaccgacaagcgcggcatcggtgacttgaatgtggtggtgacattcgcgggcgtgaccttccgcccgggtgagtatgtttacgccgacaacaacggtgtgatcgtgtcgccaagcccgctgaaaatgcctgaataaaccgcagtaaccgataggggtgaggatgttcgaggaagaaaacgcgcaatgggggctggtgcatgccctggtgctggacggtaaaggcggtgcgcgttcgattgcccggactgagctcgacgacttgcaattgcagccccaggaaagcctgtggctgcattgggatcgcagccatccgcagacccagacgtggctgcgtaaatccagcggtttgagcgagttcgcctgtgacctgctgctggaagaaaacacgcgtccgcgcctgttgccgctgccggacgccgaattgctgttgttcctgcgtggtgtgaacctcaacccgggcgccgaaccggaagacatggtgtcggtgcgtatttttgccgccgccaatcgcgtgatttccctgcgcctgcgccctttgcgcgcaaccgatgagctgctggtgcagttggcggatggcaaagggcccaaaactgcgtctgaactcatcctttatatggcgcagtacctgaccaacaaagtgcaggatctggtcactgatctttccgaaatcgtcgattccgaagaagaaaaactcgatgccgacgaacggtacacaccggagcatggcaacgttttgcagattcgccggcgagcggccgggctcaagcgttttctcgcgccgcagcgggatatttttgcgcagctgacgcggataaaattgccgtggttctgtgatgacgatgctgactactggaacgaattgaataacagcctgacccgttacctggaagagctcgaattgacccgagagcgcgtggggctggtgcttgaggccgaagaccggcgcttgagcgtacgcatgaatcgaacgatgtaccgcttcgggatcatcaccgggatcttcctgccgatgagttttctcaccggcctgctgggcataaatgtgggcggtattccgttctctgcaagcccctacgggttcgtgattgcgtgcctgatgatggtggccgtggcgctgggacaatggtggctatttcgacgattgcgctgggtttgacctgaatatgacctgaacacaggaagggtcccatgtgaccccaagaattttaccctcgtcttttaaatcacttgcgagaggtctttatgcacgatccgttcgaacagtctttgcgtgacatgctcaatgcttcgccgtccaaccgtgacgacgatgcctgcctgggccgcgtgttgaaaaccgccaaccgtcaggtcggggcgggggacctgttcgggctgctcggtcgttggctgccggcgttgatgatggccctgaacaatggttcggcccacgtatcaccggtttcccgtcgtaaacctcttgctcgcactgctgataaggctgattgaatatggaacttgatctctggacccagagcctggtcaccgcgatgaccgcattgtggaccaaggtggcgaatttcattcccaacctgtttggtgccctggtactggtgttgctgggctttgtcgtggccaagctgctcgacaccttgctgtccaagttgcttgcaaaactggggcttgaccgcctgatggcaggcaccggcctgaccaagatgctgggccgcgtagggctgcaagtgccgatctcaaccctgatcgggaagatcgtctactggtttattttgcttatttttctggtttctgcggctcaatcccttggacttgagcgagtttcagctacgctcgacatgctggcactgtatttgccgaaggttttcggtggcgcgctggtactgctggtaggcgttttactggcgcaactggccaacgggctggtgcgcggggccgctgaaggcgtggggctggactatgctgccggcctggggagaatcgcccagggcctggtgatcatcatcagtatttccgtcgcgatcagccagttggaggtcaaaaccgacctgctcaaccatgtgatcgtgattgttttgattaccgttggtctggccgttgcgctggccatgggcttgggaagccgggaaattgccggtcagattcttgcgggaatctatgtgcgtgagttgtatcaggttgggcaacaggtgcgtgtgggcgaggtcgaagggcaaatcgaggagatcggtacggtcaagacgacggtgctgaccgatgacggtgagctggtgtcgctgtccaatcggattctcctggagcagcaggtcagtagccgctaacccggcaaaccctgctaatgtacgccgccgcaaacccggctgaccgggctgtagcggacattgacctgactgtcggcacgacttgttttgaataaagcccaaacgctgtccacgcgctatgacccccgtgagctctctgatgaggagttggtcgcgcgctcgcacacggagctgtttcacgtaacacgcgcgtacgaagaattgatgcgcagatatcaacgcactctgttcaacgtttgttcaaggtatttagggaacgatagagatgcggatgatgtctgtcaggaagtgatgctcaaggtgctgtatggcctgaagaactttgagggtaaatcgaagttcaagacatggctctatagcatcacgtacaacgagtgcatcacgcagtatcgtaaggaacggcgaaagcgtcgcttgatggacgctttgagtctggaccccctcgaggaagcgtctgaagaaaaggcgccggttcccgaggagaaggccggacttgatcgctggttggtgcatgtgaacccaattgaccgggaaattctggtgctacgttttgtcgcagagctagagtttcaggaaattgctgacatcatgcatatgggtttgagtgctacaaaaatgcgttacaaacgtgctcttgataaattacgtgagaaatttgcgggcgagactgaaacttagtgcgtggcaaatatctcttacgtgtaggcaagttctgttagacttgtcgccgagttgtcccccggtttgtgggactgctttacaatcaccagatggggatttaacggatgaaactgaaaaacaccttgggcttggccattggtactcttattgccgctacttctttcggcgcactggcacaaggccaaggcgcagttgaaggcgagctgttctacaagaagcagtacaacgatagcgtcaagcacatcgaagacggcttcaacccaggcgctcgcattggttacttcctgaccgacgatctgtccttgaacttgtcctacgacaagactaaccacacccgttcgaacgacggtactggcaaccagaagatcggtggcgacactagcagcctgactgctcagtaccacttcggccaggctggcgttgattcgctgcgtccatacgtagaaggtggtttcggtcaccagagccgtagcagcgttgaagctgacggccacaaaggtcgcgatcagtccaccctggctatcgctggcgctggcgtgaagtactacttcaccaacaacctgtacgctcgtgctggtgttgaagctgactacgcactggacaacggcaagtgggactactccgcactggttggtctgggcgtgaacttcggcggcaacgctggcgcagctgctccagctcctactccagcaccagctccagagccaactccagagccagaagctccagttgctcaggttgttcgtgttgagctggacgtcaagttcgacttcgacaagtccgttgttaagcctaacagctacggcgacgtgaaaaacctggccgacttcatgaagcagtacccacaaaccaccaccgtggttgaaggtcacactgactccgtaggtccagacgcttacaaccagaagctgtcccagcgtcgtgctgacgcggtcaagcaagttctggtcaaagacggtatcgctcctaaccgcgttagctcggttggttacggtaaatcccgtccagttgctgacaacgcaactgaagcaggccgtgctgttaaccgtcgcgtagaagcctcggttgaagctcaagctgctcagtaattactgagtggtagaaaaaagcccggcttaggccgggctttttttcgcctgcattttgcctcaggcactagccgcggctgcgaggtaagctgcctgcgcggttgcggcgacagggccgatcaccaggatcgccgggcttttcaacgcgaatacccgggcatcttcctgcatgagcgacagctggctgcggcactcgcgctgctggggcagcgatgcgttttcgatcatcgccaccggcatatccgccgccatcccgccgtccagcagttgttgacgaatttcctccagcttcgccacgcccatgtaaatcaccagcgtggtcccgccctcggccaaagcacgccaattcaggctgctgccatcctgggtatgtgccgttaccagggtcacgccacggctgacaccgcgcaacgtcagcgaaatatcgcagttcgtcgcgcccgccaatcctgcggtaatgccattgaccagctccacctcgaccccgcgttcacgcagccatgtcgcttcttcgccgcctcggccgaaaatgcacgggtcaccgcccttgaggcgtaccacgcatttgccgtgacgcgcgtaccgcagcatcaggcgatggataaaatcctgtggtgtcgagcggcaaccgccgcgtttgcccacggtgatgattcgcgcaccctcgcagtgctccagcactgccgggttgaccagatcgtcgatcaacaccacgtcggcctcgtgcatcgcccttaccgctttgagggtcagcaactctggatcaccaggccctgcgcccaccagccagacttttgcgctcatgtttttcccctcacacactgattgcgattggctgtgggttactggccaaaagacgtttgatttccggcacacaagagccgcattgggtaccacagccgagtgcctgtttcagtccgtccagaccaaggccttgagcgataccggcgcacaccgcgctttcgctgacgtttttgcaattgcacagaatcttgctgctggccgccgtgccacctggcggtgcgctcaacggagccaaaagccagcggcgcagttgatcgtcggtacggccatccagccacaggctctgcaaccagtgccgcgccagggtttcgccggccaggcgcagggccgtgatgcggcctttctcgatcttcacgcgcttgccgattgagcggcgcgggtcgtcgtaggccatcaccgggccgtcgttgaggcccagcagttcatcgattcgggtaagccattgcaggtcgggcgcctcggtatgcgctgcgcgcaggagtaaggctggccgttcacgcccagtcaggctcaggctgacgtaggcaaagccctcacacagaggtcgcagggcgtcaaagtgttgctgaacattaccttcgatcaaggcaaacaactgccagggcaattgcaccgcttccaggcgcacaccgctgtgtttgagttccggttgtttcgacaaagggtcaaacgctggctgcgtgagggcattgacgccgcccttgagaaagcggtcgccccaatgcatcggcaggaacgcctggcccgggcgcacgctgtcatcactgctgacagcgacgattacagcgccgcgacggctcttgaggttgaccagatcgccttccttgaggcggtggcgccgcaactcatccgggtgcaggctcaacagcgcttcactgacatgcccgaatagctgtgccgccgtgccggtacggctcatgccgtgccactggtcgcgcaggcgcccggtgatcaaggtcagcgggaagcgcgcgtcgcgctgctccttggcggcgcggtaagggtcggcgataaattgcgcgcggccgctgatagtcggaaacacgccatcggtatacaggcgaggcgtcccgctgcgtgcgccctccggaaatggccattgttgcggcccgatctggtccagcagctcatggctgatgcctgacacgtcaaggtcacggccgcgggtcagcaccttgtattcatcaaagacctgcgccggcctttcaaaggcgaacaagctggcggaccccggacgcaagcgtttctcaaggcgttgtgcgaaatccacggtaatggcccagtccgggcgtgcctctcccggtgggaggatggcacggcgtacgtgggaaattcgccgctcggaattggtgacggtgccttccttctccccccaactggcagcaggtaacagcaagtcggcataggctgcggtttcggtggtacgaaaggcttcctgcaataccacaaacgggcacgccgccaacgcagcacgcactgcgttctggtccggcaaggattgcgcggggttggtgcaggcaatccacagcgccttgatcttgcctgcctggacctgctcaaacagctcaatggccgtcagcccggtcggtgccggcaacgaatcaacgccccagtaagcggcgacctccgcccggtgctcggggttcgcagcctctcgatgacccggcaacaaattcgacaagctcccggtctcgcgtccgcccatggcattcggctgcccggtcagggaaaacggaccacagcccggccggccaatggtgcccgtggccaggtgcaggttgatcagcgcgctgtttttcgcgctgccggcggtggactggttcagccccatgcaccacaacgagagaaaactgccggaggtgcccacccattccgcgcacaggcgcagttgctcgacgctgatcccgcacagctgcgtgaccatttgcggtgtgtagtcatgcaccagccgcttcaactcggccattccttcggtatgggcctgaatgaagtcacggtcgatccagtcttcccacagcagcagatgcaaaatcccatggaacagcgctacatccgtcccgggcaagattgccaggtgcaggtcagccaaatcgcaggtgtccgtccgccgtgggtcgatcaccagcactttcatctgtgggcgtcgcgccttggcttcttccaggcgtcggaacaataccgggtgggcgtaggccatattgctgccgacgatcatcacgcagtcgctggactcaaggtcttcgtagctgcatggcggggcgtcggcccccaggctgcgcttgtagccgaccactgccgaagacatgcacagccgagagttgctatcgatgttgttcgtgccgaccagtgcccgcgtcagcttgttgaaactgtagtaatcctcggtgagcaattgcccggagatgtaaaacgccacgctgtccggcccgtgttcggcgatggtctcggcgaacacattggccgcgtgttccagcgcggtatcccagtcggtgcgggcacgcgccaaacctttgcccaagcgcaattccgggtacagggcgcgggcattcaagtcgccagtcaagtgcaagctggaacctttgctgcacaacttgccgaagttcgccgggtggctcgggtcgccctgcacccccaggatctgcgagccgtcatgctcgatcagcacgccgcaacccaccccgcaataacagcaggtggacgcggtggtctggcggttcatcaaccggcgtcccgcagggccagcatcacccggccgttttccactcgggccggatggtggtgggcgcagccgacgtcgggcgcctgggcctcgccggaggccaggtcgatctgccagttgtgcagcgggcacgccacgcgtttgccgtagatcaagccttgggacaatgggccacccttgtgcgggcaacggtcgtcgagggcgaaaacttcgtcgtcgctggtacgaaaaatcgcgatgtcgccttttggcccattgatgatgcgcgagcccaaggcgttgatttcatcgagggcgcagatatccagccagttcatgccggcacctccagctgtttgacggggatgacatcgaattccttcttcagcagcggctgttccaggcgctccttccacgggtcctgttcaaacgacagcgagaactgcagccgttcgttaagcgccttgcgccgttccgggtcttccagcacagccttcttgatgtgctccatgcccacccgttgcaggtagtgcacggtgcgctccagatagaaggcttcttcgcggtacaactgcaggaaagcaccgttgtactcgcgcacttcctcggcggttttgagcttgacgaaaaactctgcgacttcggtcttgatcccgccgttgccgccgatgtacatctcccaaccggaatcgacgccgataatgcctacgtccttgatgccggcttccgagcaattgcgtgggcaaccagacaccgccagcttcaccttgtgtggcgaccacatgttgaacaggtcatgctccagctcgatgcccagctgcgtggagttctgtgtaccgaagcggcagaactcgctgccgacacaggtcttcacggtacggatggatttgccgtaggcgtggccggacggcatgtcgaggtccttccagacgcccggcaagtcctgtttcttgatgccgagcaggtcgatgcgctggccgccggtgaccttgaccatcggcacgttgtacttgtcagccacgtcggcaatacggcgtagctctgaagggttggtcaccccgccccacatccgcgggactacagagtaagtgccgtctttctgaatgttggcgtgggcgcgttcgttgatcaggcgcgattgcgggtcgtctttcgcctcgccgggccaggtggaaatcaggtagtagttgagtgccgggcggcaggtggcgcagccgttcggggtgcgccagttcaggtaactcatggtgccggcgatggtcagcaggtgttggtcgcgaatggcctggcgaatctgcccgtgattgaggtcgctgcaaccgcagatggctttttcgcttttcggtttgacgtcggccgcgccgcccacggtgttgatcaggatttgttccaccaagcccgcgcaggacccgcaggagctggcggccttggtgtgttttttcacctcgtcgacgctgaacagcccctgttcctggatcgctttgacgatggtgcctttgcacacgccgttgcagccgcagacttcggcgttgtcggccatgctcatggccttgtcctgaccttggtggccgacgtcacccagggcgttttcgccaaacatcaggtgatcgcggatctcgccaatggcatggttctcacggatctggcggaaataccagccgccatcggcggtgtcgccgtacaggcaggcaccgacgaggatgtcgtccttgatcaccagttttttgtacacgccgccaatcgggtcggagagggtgatggtctcggtgccttcgccgcccatgaagtcgccggcggaaaacaggtcgatgccggtgaccttcaacttggttgaggtcaccgagcctttataggtggcaaaccccagctgggcgaggtggttggcgcagaccttggcctgttcgaacaacggcgccaccaggccataggcgatcccgcgatggctggcgcattcgccgatcgcatagatgcgcgggtcgtaggtttgcagggtgtcattgaccagaattccgcggttgcacgggatgccggatttttccgcgagctcggtgttggggcgaatgccggcggccatcaccaccaggtcggcgggaatgatgtcgccattcttgaattgcaccgagcccacgcggccattgcccgcgtcatgcagcgcctgggtttgttcgcacaggcgaaacaccagaccacggctttccagttcggtttgcagcaactggccgctggtcttgtccagttgccgctccagcagccattcgccgatatgcaccacggtcacgtgcatgccgcgcagcatcaggccgttggcggcttcgaggccgagcagcccgccgccgatcacgactgcgtgcttgtgcgtcctggcggtgtcgatcatcgcctgggtgtcggcgatgtcgcggtagccgatcacaccctgcaacgtattgcccggaatcggcaggataaatggcgtcgagccggtggcaatcaacagacggtcgtactcggcttcggtgccgtcctcggcgatgacgaggcgtttgacgcggtcgatctgcaccaccttgcggttgagcaacagcttgatgttgttgtccaggtaccaagccaggtcgttgagcacgatctcttcgaaggtctgctcaccggccagcaccggcgacagcagaatacggttgtagttggtgtggggctcggcgccgaacacggtgatgtcgtataggtcactgctcagcttgagcaattcttcaagggtgcgaaccccggccatgccgttgccgatcatcactaatttgagttttttcatgtcgttctccgcaatggctcgacaaatcacgcgcaaacaaaaaaggcgccccgctagttacctagcgaggacgcctttgtcctggtcccgttctctcgggaagcgcggcccttcgacgttgaaggggcggctatatgtctattgttgggttgagtaatgcagtggttgtgccaagttcggtgaggcccggttttattggccctttgcccggagctcaatggcttttcgcgctttagtggtgcaacagccagtacagcagcaccagattgaacaataacgacgccatcgccagggtttgccagaccttcagcggttcgcgctccagcagaggccttggccgaacgctgagttcgcggcgatcggcctgctccagcacgagcaaccattcttcggcggtttcataacgctgcgccggttgggcggccacggcccggtccaggctgaggggcaaccagtccggcagatcgggacggtagcggctggcgctgacagcctgagtgaaacgtggccgttgaaatgcttcgatttccccgtagggatagtgcccggtcagcaagtaatacagggtcacgccgacgctgtataaatcctgttgcggcgtaggccgatcaccaccgaatgcctcgggcgcgataaagctcggcgtgccgggcagcaaatgggcgcggtcttcagagagccccgggcagtaggccaggccgaaatccagcacgcgcagttcgccatcgtcgcccaacagcaggttctgcggcttgatatcgcggtgcaggatctgccggcgatgcagcatgcccaccgcccgcagcaaacgctcggcgatggattgccattgcgcaagaggtaacgggccttgttgcttgaacagctgcgcaagggtttgcccgcaatattcccgcatcacgtagtacaaatgctggcgcccgctggcggcatggacttcaggaaatgcacgcccggcaacacgtcgcaaaaaccactcctccgacagcaacgcctggccggcgtcgctgtcatcgtcgcgattgaggggcaaggttttcagcagccagggttgctgctgggcatcacgtacgcggtagagcaacgattgccggctctgcgccagcacgctttccacctgccagccctcaaagcgctgcccgggtttgagcggcggtggcaatggccattgctgcagctgcaccaatgcatcgccgagggtggccgcgccgagtgtgtcgatgcgcaccagcagggcgctggcgttgtcgaggctgccggccaggtgcgcagcattgaccagggtgttgaccgccacctcaaggtcggcttgctcgcgcaggatcgcgcaaatgctgtgatcgccgagggtggcccacacaccgtcactgagcagcaggaagcattcgccctcgcgcagttcgccatccatgaagtccagcaccaggtgttgatccaggccgagggcgcgcttgagcacatgttgcatgcccggttgttcccacacatggtcctcgctgatgcgctgcaattcgtcgtcgagccagcgatacacccggcaatcaccgacgtgggccaaggtgaaacgctggccgcgaaacaccagggcgctgagggtggtcagcaggggttggccacccccgttggcttgcaaccagcgattttgcgcgagcaacaaacgttcgagcgcctgggccacgccccaggtttgcggcgtggcgtagtagtccagggccagcgcctgcaaggtcgagcgtgcggccaggccgccgtcggcacactggctgacgccgtcggccagtgcgcacaagtagcctttgctcgcggccagttccgccacgggcgtgaccacgcgcagcgcgtcctggttttctgcccgcggcccaatggcgctggcctgggcgatgctcaggtgcaggctcatcagacgcgtgcggcggtcacggcggccgaaccccaagtggttctccagcgacgtttgacgccatgcaggccaaaccaggccagcacgccgaggctggcaaacaaccacagggccagttgatagctgccggtgctctgtttgatcgcgcccatgcccgccgccagggcaaagccaccgataccgccggccatgccgatcagcccggtcatcacgccaatttcaaggcgaaagcgttggggcaccagttgaaacactgcgccgtttcctgccccgaggccgagcatggtgcaaacgaaaagcgccagtgccgcgtaggaactcggcagattaaagcccaccgccgcgatgcagatcgccgccacgctgtacatgccgagcagggtgcgaatcccgccgaaacgatccgccagggcgccgcccaacgggcgcatcaggctgccgccgaacacgcaggcggcggtgtagtagccggcggtgaccgggctcaagccgtactggtcgttgaaataaccgggcagggcgctggccaagccaatgaaaccaccgaaggtcacgctgtagaagaacatgaaccaccagctgtcgcggtcgcccaaggctttaaagtagtcagccatggacttggctttcgggcgctgcggtgcattgcgcgcgagccaggcgaagacgatcagggtgatcaccagcggaatcagcgcaaagccgaacacgttgctccagccaaacgcggcggcgagcaccggtgccagcaaggcagcaaacacggtgcctgagttgccggcgccggcgatacccatggccttgccttgatgttcagccgggtaccactgggaggccaggggcagggcgacggcaaaggacgcgccggccatacccaggaacacgcccagcaacaacgcctgctcataactgtgaataccgagcttccaggcgccaaacagcgctgcaatgacaatcacctggccgatcagcccggcggttttgggcgacagcttgtcggccagcatgcccatcaaaaagcgcagcaccgcgcctgccaatatcggggtcgccactaccaggccacgctgttgggtggtcaggtgcaggtcggcggcaatctgcaccgccagagggccgagcaggtaccagaccatgaagctcaggtcgaaatacaggaacgcggcaaacagggtcggggtgtgcccggatttccagaagcttgatttcatcacgcacctcaacggttggggtcttttaagaaggccgagtgatggggtcgccggctaaaggccgccccaccggccccacgctctggggccaaaacgaaaaaacgccgccaccgggttcgcgagggcaaaccggatgtgcgacgtctttgtcgtggaggggcaaccgccgttggctacctgtgatgaatgcttagcaagagctgagccagatcagccgagcagctcgctcatggcgataatctgctctgccacctggatcagtttctgctggcggctcatggcctggcggcgcatcagtgtgtaggcctcttcttcattacaactcttcattttcatcagcaagcccttggccagttcgatgcgcttacgctcggcgagctgctggtcgcgggcctggagctgggcacgcagggcctggtcactctcgaagcgcgccatggccacgtcgaggatcggctgcaagcgctgggcctggatgccttcgacaatataggcgctgaccccggacttgatcgcctggcgcatcacgttcgggtcgtgctcgtcggtaaacatcacgatcggccgtggctggtcgcggctgaccagtaccacttgctccatgacatcgcggccgggtgactcggtatcgatcagaatcacgtccgggcgcaccgtttcgacgcgtgcaggcaggtcgatggtcaggccggactcgtcgatcacctcgaacccggcctcggtcagcgcggccttgaggcgcccgaccttgcgcggggtgtcgtctatcaacaggattcgcaacatatccgttctcctgtcagcgcaaggcttggcggccggcgtggtcagccatggcatgcaagcgaaagctgcgggcgtaggtggcagggtcagtaccgtcccagatcttgccgtcgatcaactggctgctgcgcaggtcctggctgttcgccggcacgccgatggcagcggcggcctggcgatacagggccagttgttgcacctgacgggagacgccgaggtagtccgggtcttcgcgcagcaggccccagcgtcgaaattgggtcatgaaccacattccgtcggacaggtagggcaggtttacctcgccatcgccgaaaaagcgcagcgcgtgggggtcttgccaagtgttgcccaagccatcgtcgtaagcgcccaacaagcggggttcgatgcagtccagcggcgcatcgaggtagtcacgggcgctgagtagttgtgccgtggagcgacggttttcctggctttcttcgataaagcggcttgcttcaagaatcgccatgaccagtattcgggcggtattggggtactgatcaacgaaggcctgggtgcagcccaggaccttttccgggtggtccggccagatcgcctgggtggtcgccagggtaaagccctggttctgctttacggcgctggcgcaccagggttcgcccacacaaaaaccgtcgatacgcccggcttgcagatgcgcgaccatctgcggcggtggcaccaccacactgtccacatcctgcaacgggtggatgccttggctcgccagccagtaatacagccacatggcatgggtgcctgtgggaaatgtctgggcgaaggtcagttttgtgcggctttggtgcacgtgacggtccagcgcctcaggagtgatcacgccttgctgctgcaggccgtgggacaggttgatgctctggccgttctggttcaggcccatcagcacggccatgtcggtcggtgcgacgccaccgatgcccaggtgcacggcgtagatcagcccgtagaggctgtgggcggcgtccagttcgccactcaccagcttgtcacgtaggttggcccaggatgattgacgcttgaggttcagtgtcagcccgtagggttgggcgaagccctgggtcgcggcgacgaccagtgaggcgcaatcggtcagggccatgaagccaaggttcaggctgctcttttccggggcatcactgccatttacccaggccagcgaagtgttcaccgggctgttgccgaccgaatcgttcatcaacacctaccttttctctcaaaaaaaagcgtcgttccctgagatggcagtacaagccattgtgggtaacgacgcctttgcccgtaagcccgctccgacgttggcgcgcgctttgatgcagtgtctgtagcaaggcacatgccacgggcagtaaggcggagtttgccgtcagctttccatcaagattgaaagccgacggcctctcagtatggccgcctctttacgccagactgccaggaaccccacggtgtctatcgattctccggcaatgttgagcggccactggttgtgccggtggctgctgtgccttgcgttagtgtccgtcaatgttcccgcccaggcggagcgctaccaggcccgggatgaaagcctgcacaccttttttaccgtgttgtcggtgcctctggggctgcccgtcgtcgtcagccgcgatgtggcgcgcaaacgcatttccggtgccttcgatttgggcgcggcgcagcgaacgctggaagtggtcgccgagcagcaaggcctgatctggtacagcgacgggcaggcgttttacgtgtatgacgcgggtgaggcgaaaagctcggcagtggcgttgcggcatatctcggccgacaggttgcgcaccttcatgcgccgttccgggctggatgaatcgcgctatcccctcagggaaagcggcgcacagacgttctatgtgaccggcccgcccaattatgtggatcaggtgctgcacctggcccagttgatggacaggcaacgtaccgaggtgcgcgtgggcgcccagacctttggggtggtgcaggtattcaatacccacgttaccgaccgtcagtacgtcatgggccatgaaaagatcactgtcccgggcatggcctcaatgctcgaaaccctgctggccatcgagcagaaggcgaatgcgaagccgccccgaagcgtgttggccgacaagagcctggtggtgatcgcataccccgactccaacagcctgctggtcaagggtaagcctgcccaggtcaaggcgctggaggaactggtggcggagctcgacaaacccaagcgggcgattgaggtgtcgctatggcgagtggacgtggaccgtgacgaactgcagaaaatggacgtggcctgggcccaggcaggtaacaccacggcggcgccgacccatgtagtggaacccctggaagataaccgtttgatggcgcagctcattgcactggagcggcggcgcaaagcccgcgttgtcgcgtttccggtggtcctcacccaggaaaacgtgccggcggttttccaggacagccataccttctacctgcccaggcccgcaggtgatagcactgagttgcagcccgtattgtatggcacgcaagccagtgtgctgccgcgctttgcgcaagccaacgagattgaaatgcagctgacccttgaggatgagcggcagatggggggtaaacccaagcctgattcagcggcggcggtgggccgtgtggggctcagcacggtcgtgcgcgtgccccagggccgacgcctttggctgggtggtttccggcgtgaggacgaaggggctgtgcgcaatcgacgtgccgaggtgcgactgtttgtgatccaggcccgggcggttgggaacgagcccaagctgctggccggcgcgatcgggcctccggcgctgacacaacgtcaatatgagcgcgtgcaacgcgcgtttgtgcgggaaaaccatgaaagcccggcaatggaatgacgttgcggttggccatggtgaaaagtcctacgtggcgcctgccaaaagcctcgattacataggctttttcctaaggatgtgcggggctcaggtttttatagtcgcggcattggcgtatcggccgtttctggaagtaaggaattcaatgtcagtagtcgaatgcagaggtgtgtatgaccctcgacagtgatgggctgacagcctcacggttttttgccgggtggaccttgcatggcgatggccggttgaccggcgaaggcgtggatattcaattgccgcccaaggaatggcatgtgttgcacctgctgctggcttccgcgggggcgctgatgaccaaggactatctgctggagatggcttggcctcatggggatgttgcggaggagtcgctcacgcgctgcatctatgcgttgcgtaaacacctgaaggccgacaaggggttcattaaaacgatctacggcaggggctaccgctttacctgtgcggtgagcgttgaagagcatgcctcccgccagattgggcagggcagggcgcaacgtatctgtttggcgtgtggccaggtgacccatgattaggcgcctggtcaacggtgtgttgttgagtatctggttgggcgcccagcaagcctgggccggttgctgggatgacgtggcccgccgttacgacatcgagcctgagttgttgaaggccattgctgcggtcgagtcgggttaccgtgagggggcgttgaacacggccaacagcgatggctcgcgggatattggcttgatgcagatcaacagcatgcacctgccgcgcctggccaagcaggggatcactgagcagcggttgttgagtgagccttgtttatcggtcgaagtgggtgcctcgatcctggccgagttcattcaacggttcggctacaactggacagccgtgggttcctacaacgcgggtgcggcgcctgagcgtgcggcattgcgcctgcgttatgcagaaaagatctgggcccgttatgaggcgctggttgcgcaacgccgctgatgattggatggcgcctcgcacccgggccgtcaccccggctataatcggcgccacctatcgtcgccatccgagtctagcccgcccatgtataccctggcccgccagctgttgttcaaactctccccggaaacgtcccacgatctgtccctggacctgatcggcgccggtggccgcctggggctcaatggcctggtatgcaaggccccggcgaaaatgcccgtgtcggtgatggggctcgatttccccaacccggtcggtctggcggctggcctggacaagaacggcgcggccattgatggctttgcgcagttggggtttggttttgtcgaaatcggcaccgtgacgccacgcccgcagccgggcaaccccaagccgcgcatcttccgcctgccggaagccgaggcgatcatcaaccgcatgggtttcaacaacctgggcgttgatcacctgctgtcgcgggttcaggcggccaagtacaagggcgtcctgggtatcaatatcggcaagaacttcgacacgccggtggagcgcgcggtagatgactacctgatctgcctggacaaggtctacgcccatgccagctatgtgacggtcaacgtcagttcgcccaataccccgggcctgcgcagcttgcaatttggcgactccctcaagcaactgctcgaagccttgcgccagcgccaggaagacctggctgtgcgccatggcaagcgcgtgccgttggccatcaagattgccccggacatgagcgacgatgaaaccgtactggtcgcccaggcgttggtggattcgggcatggacgcagtcatcgccaccaacaccaccctgagccgtgttggcgttgaagggttggcccatggtgacgaggcaggcgggttgtcgggcgcgccggtgcgtgatcagagcactcatatcgtcaaggtgctggccgccgagctggcggggcgcttgccgatcatcgcggtgggcggtatcaccgaaggcaagcacgcggccgagaagatagccgccggcgccagcctggtgcagttgtactcgggctttatctacaaggggccggcgctgattcgcgaagcggtggatgcaatcgctgcactgcgctgaggcttttactgtgggagcgggcttgctcgcgaaagcgtcgggtcagtcaggctaactgttaatgacacgccgccttcgcgagcaagcccgctcccacaaaagccgtgtttcttcaggccattaaaaagggctccctaaaggagcccctgggccgaagcccgccgcccggatggggcgcgcgtggttaaggtgttgcagattcgtgctgatgtcggagttaagtgcccttgattagccgacggcgtgaagttcgttgagtctgtggatgcccgcagtgccagtcataccgtcccagttgtcgccgcgtccttctcgccagccgttgatccaggcttggcgtaccgacggtagagtaaatgggcaaagctcacgggatttgccatgaacgccatattgatatccgcgtaaaaatgctctttccaacggatcacgcttaagtcttctcatagggtgtttccctcacttgttgactgtctagatatccttcgaccccggggggaggtcgggcagagtttttctgccgttggtgggctcgctgccggcgtggcgagcctatgtgtcgacgtcgttacggcgtcaacctgtgttgagttctaaccaataggtcacatggattcaatgatcgttttgtcataagcacgtaacgataatgatgctatagccataagctgggatggcttttcgccccatttaaaaggcaaacccagctatgatgtgccctgcaaagaggatgggtttaatcctttagtgagaatgcccgcccgttgcagtcggttattattcgacgaagggtcggaatatttctttttgttgctgcaaattctttatctgcttcgacaataaagggccaaatgccctgaagccgaggtggaacggcacattcgtgccacgcgagcactcttcaagaaaagtgcttgataaaaacccgagccggcgatgcgtcgcccgttcatttattgctgaaaagcctggaatgccccatgtcggaccgttttgaactcttcctcacctgccccaagggcctcgaaggcctgctgatcgaggaagccgtcgggcttggccttgaggaagcccgcgagcacacctcggccgtgcgcggcatggccgacatggaaaccgcttaccgcctgtgcctctggtcgcgtctggccaaccgcgtgttgctggtcctcaagcgcttcccgatgaaggacgccgaagacctctaccacggcgttctggatatcgaatgggccgaccacatggtgcccgacggcacgttggccgtggaattcagtggtcacggttcgggcatcgataacactcacttcggcgcgctgaaggtcaaggatgcgatcgtcgacaagctgcgtacgccaactggcgagcgcccgtccatcgacaagatcaacccggacctgcgtatccacctgcgtctggaccgtggcgaagccattctttccctcgacctgtccggccacagcctgcaccagcgcggctaccgcttgcagcagggcgccgcaccgttgaaggaaaacctggcggcagccattttgatccgtgccggctggccgcgcattgctgccgaaggcggcgcgctgagcgacccgatgtgcggcgtgggtactttcctggtcgaaggcgcgatgatcgccgccgacatggcgcccaacctgaatcgtgaactgtggggtttcaccacctggctcggccacgtcccggcgctgtggaagaaactgcacgccgaggccgctgaacgtgccgccatcggcatgaacaagccgccgctgtggatccgtggctacgaagccgacccccgcctgatccagcccgcgcgcaataacattgaacgcgccggcctgagccactggatcaaggtgtaccagggtgaagtcggcaccttcgagccgcgcccggaccagaaccagaaaggcttggtcatctgcaacccgccgtacggcgagcgtttgggtgacgaagccagcctgctatacctctaccagaacctcggcgagcgtttgcgccaggcgtgcatgggttgggaagccgcggtgttcactggcgcaccagacctgggcaagcgcatgggcattcgcagccataaacagtattcgttctggaacggcgcgttgccgtgcaaattgctgctgatcaaggtcaacccggaccagttcgtcacgggcgaacgtcgcaccccggaacaacgccaggccgagcgtgagcaagccgcttacgaccaagccccggctgagccgcaagaacgccagtacaacaagaacggtaacccgatcaaaccggcaccggcacctgtggttgagcaggcgcgcctgagcgaaggcgggcagatgtttgccaaccgtctgcagaaaaacctgaaactgctgggcaagtgggccaagcgtgaaggcgtggattgctaccgtgtgtacgatgccgacatgccggaatactccatggccatcgacctgtaccacgactgggtccatgtgcaggaatacgccgcgccaaaatccatcgacccggaaaaagcctccgcgcgcatgttcgatgccctggccgctattcctcaggccctgaacatcgacaagggccgcgtgctggtcaagcgccgcgagcgtcagagcggcaccaagcagtacgagcgccagagcgcccagggcaagttcaccgaagtcagcgaaggcggcgtgaagttgctggtcaacctcaccgactacctggacaccggcctgttccttgaccaccgcccgatgcgcttgcgtatccagaaagaggcggccggcaagcgcttcctcaacctgtattgctacaccgccacggcgagcgtgcacgcggccaaaggcggcgcgcgcagcaccaccagtgtcgacctgtccaagacctacctggactgggcgcgtcgcaacttctccctcaacggtttctccgacaagaaccgtctggagcaaggtgatgtgatggcatggctggaagccagccgcgatgagttcgacctgatcttcatcgacccaccgaccttctccaactccaagcgcatggaaggcattttcgacgtgcagcgcgaccacgtgcagttgctcgacctggccatggcgcgcctggcgccgggcggcgtgctgtacttctcgaacaacttccgcaagttcgcgctcgaggacaacctcagcgaacgctatgcggtcgaggagatcagcgacaaaaccatagacccggatttcgcacgcaacgcgaagattcaccgggcgtggaaaatcaccgcgcgctgatccctgcaccaagttggcacaaaaaagccgcaagccttgattattcgaggcttgcggcttttttgcgctggtcaaacacaatgcctgtggctataactgaaagcctagccaaagtgacacccccgcacgctggcgttgtgagtgttgcctatgccgttacaagccgtccgcccgaaaatccttggctttatcagtgagcaggcgtcggcttggctggtggcactggtggtgttattggcaggtggcgcgctgacggtgatcgttgcgtgggcggctgctgacctctatcaacaacaggtgcgccagcgtttccagttgctggtcaacgagcgttacacccgcttgcaggagcgtttcgaggaccaggaacaacgcttgggcagcctgcgcaggttcttcgtcaattccagtgatgtctcccgtgcggagttcgacggtttcgcccagcctttgctgttgcgcgcccgtgcctatgcgtgggcaccgcgaatttttcgggaccagcgcagccagtttgagcaggaaatttcgcgccagcgtggcgttcccttcgccatccgcgagctgagttcgtcgggtgagctggcgcctgcttccgaacgcgatgaatacgtgccggtgctctacagccagacccaaagcttgctggggtcgccgttgggttttgacctgctggctcaaccgttgcggcgctcggcgcttgaacgggcgcaaaaaaccggcaagccagcggtgtcccaaccgatgcaattggtgggggtggaaccggcctatgccgccggcgtgctgttggtgtcccccgtcagcaaatcccctgaggtcgagccctacgggtttgtgatggcggtgatcagcatgcgccagttggtagccgacggcttgcccaaacccaatcgcgacaacctggtgatgcagatcgtcgacacctctgacacccaacaacgtgtgctgtacgcgtccagcaatgccgtcggcaacagtgacctcacggcggcgcgccgtctcacccttggcgatcacgtgtacgcactgaccttgcgcaccagccaggtgttcgaccaggccaatcactcgtcgatgaacaccatcctcaccatgggcgggctcctcagtctgttgctcagcgtattgctgtacgtgttggtcagccagcgccagcgcgcactgaaactggtggagcaacgcactgtgcaattgcgcctgcgcgagcaggaactgcgtggggcgcacgggcaattgcgcagcgtgctgaatgcggccacgcaagtcgcgatcatcgccactgacttgcgtggtgtgatcaacaccttcaacgctggcgccgagcagatgctggggttcaaggcagagcaagtgctggggcgcatgaccctggaaagcctgcacctggccgttgaacttgaggcgcgcgccgccagtttgagtgtggccttgggcaagcgcattccgccaagccaggccatgttggtggagagcccggatcacttgcgcgaagctcgcgagtggacgctgttgcgccaggacaacagcccattgaccgtgaatatgcttggtactgtgctattggatgatcatggcctgtggatcggccacctggcgatttacctggacgtcacggagcagaagcgcgcctacgaagcgctggccgtgcgggaccgcctgctgaaaaaactcagctcccatgtgcccggcgggatcttccagttcaccctggagccgcgagacaactggcgtttcatctatgccagcgatggcattcgcgatatctatgaaatcgaacccgctgtgttgcaacacgatgcgaacaaggttttcgagcgcattcacccacaggacgccgagcgggtgcgggcgtcaattcgtttgtcggcgctgcagttgagccattggcgcgaagagtaccgcgtgttgttgccgcaacggggcctgcgctggattcgcggtgaagcgacgcctgaagagctggcgggcggcggtacgctgtggcacggctacgtgtcggatatttccgatctcaagcgggttgaggaagaactgcgcgcgctgtcgatcaccgacgcactgaccggcatccataaccgtcgctatttccaggaccggctcaaggccgagatgcttcggctcaatcgcagttcgggggcgctgtcgttgatcatgctcgacattgatcatttcaagcggatcaatgacgtgcacgggcacggtgtgggcgacggagtgttgcaggaggtatgcaaacgtatcggccagcgtttgcgtcgcaccgacgtgttttgtcgtctgggcggtgaggaattcgtggtgctgtgccccaacacggatgccgaacaggcttacagcgtggcgatggaattgtggcagtcgttgcgcagtgcaccgatggagagggtgggagtggtgaccgccagtttcggtgtagccagttgccggcttgatgaaggcattgacgggctgttactgcgcgcggattcggcggtgtatgtggccaagcaggcgggcagggacagggttgaggcggagcggttgcgcgcttgagtgccaacacagccttaaaccgtgggagctggcttgcctgcgatagcatcacctcggctcaactggaataccgaggtgtccgtatcgcaggcaagccagctcccacacaagcccgctcccgcactaaagtacaggtgcggccgctgcgattttcggttggcgatacaggtcgagcagcacctgatccagcaccgatgacgcgccccacggtttcgaatcgttaagaatcgccaccaccacccaagtattgccgttgttgtcgcggctgaacccggaaatggcgcgcacagtgttcagggttccggtttttacgtgggcttcaccccgcatggccgtggttttcaagcgtttgcgcatggtgccgtcggtaccggcaatcggcagcgagctgatgtattcggcggcgtacgggcctttccaggcggcttgcagcatggccgccatctcacgggcactgacccgttcggcgcgggacagcccagagccgttttccatcaccagatgcggtgcggtgatgcctttcttcgccagccactggcgcaccacacgctgcgcggccttggcatcgtcgccatcggcatcgttgcggaactgcgcgcccaaactcagaaacagttgctgggccatggtgttgttactgaacttgttgatgtcacggatgatttccgccaggtctggcgaaaacgcacgggccaataccttcgcgtccttcggtaccggcgcctgaatatcgcggccctggatggtaccgcccagttcctgccagatcgcgcgcacggcgccggcggtgtaggtggcgtggtccagcagcgacaggtaggtctgcgaactgcagccatcggccaattggccgctgacggtcacggtcacactgccatcggcggcggtgacggggctgtagcgcacgtcgccggtgcattgcttggcgttggagactttcacctggttgtcgatgcgaatgctcgcaatcggcggttccaccgacacgatgacccggcccgaatcattgcgggtcacgaagcgcaaagccttgaggttgaccagcagtgcatccggcttgaccaggaacggcttgttctcgtcattgccgtcgtcattgaattcgggcaactgcggttggttgaagaagctgcggtcgagcaccaggtcgccggtgacttgctgcacgccgttggcgcgcaggtcgcgcatcagcagccagagtttttccatgttcagcttggggtcgccgccgcccttgaggtagaggttaccgtgcagcacgccaccgctgagggtgccgtcagtgtagaactcggttttccactggtggttggggccgagcatttccagagcggcgtaggtggtgaccagtttcatggtggaggccgggttcaccgagacgtcggcgttgaacacggtcggcgtgccggggccggtgagaggaagcatcaccagagacagcgaggtattgggaatcttggctttctgaagcgcctgctgaacattcggcggcagggtgttgttgatcggggcggcggtgacggaaaaggccagtggcaacaaaacgctggcaagcagaaatggacgcaaagatttgatcataaggaataaaaccctactgctgagaagggtgaaaaaggcgaggggtgtgtaagaaaatccctcattagtcatgaaagtgtcggcattatgccccaaggtggatccacttgtagctgaacgatagctggtattaagcgttttttttgccggcattgcgccgcctgtcccagagagtcgggcaatcgccgccttaaactgctaaagtgccgcccgttattacttaagaggattgttccaatggcgactaaccgttcccagcgtctgcgcaaaaaactgtgcgttgatgaatttcaagagctgggtttcgaactgaacctggacttcaaagaagacctgagtgaagaagctaccgatgctttcctcgaagcattcatcaaagaagccatggaagccaacggtctgggctatgtcggcggcgatgacttcggtctggtttgcctgcagaagcgtggctcggtcaacgaagaacagcgcgctgctgttgaaagctggctcaaaggccgcagcgagctgaaaagcgctgaagtcagcccgctgctggacgtgtggtatccggaaaagccgatcaacgcggccaagtgatacttaaaaaaacggcgacccaagggtcgccgtttttttatgccttgcgccagttcagaatcagcagcgtcaacacccccgccacaatcccccagaacgccgacccgatggaaaacagcgtcaagcctgacgcggtgaccataaaggtgatcagcgccgcttcccgttccttcggctcattcatggcgatgctcaggccattgatgatcgagccaaacaacgccagggctgcaatcgacagcaccagctccttgggcagggctgcgaacaatgctgccagggtggcgccaaacacaccggcaatcccgtaaaacaccccgcaccacaccgctgcggtatagcgcttgttacggtcttcatgggcatgcggcccggtgcagatggccgcgctgattgctgccaggttgataccgtgggagccaagcggcgccagcaccagcgaggccaggccggtcgcagtaattaaaggcgaggcgggcacgttgtaaccgtcggcacgcaacacggcgacgccgggcatgttctgcgaggtcatcgccaccacgaacagcgggatgccgatgctgatggtcgccgccagcgagaaatgcggggtggtccacaccggtgtcgccacttccaggtgaaagccgctgaaatccagcaaccccatcagcccggacagcactgtgccgatgatcagcgcagctaaaaccgcatagcgtggcgacaagcgcttgataatcaggtaggtgaaaaacatccccaacaccaggccggtacggtgttgcgcggcgacgaaaatctcgctgccgatcttgaacagaatccctgccagcagcgcggcggcgagtgacgccgggatgcgtttgaccagtttttcaaagctgccggtcagcccgcacagagtcaccagtaccgcgcaggtgatgtaggcgccgatggcttcgccgtaactcacgccaccgaggctggtgatcaacaacgccgcccccggcgtggaccaggcaatggtgatgggcgtgcgatagcgcagggacaagccaatgctgcacaccgccatgccgatggagattgcccagatccacgaagaaatctgcgccgtggtcaaaccggccgcctggccggcctggaacatcagcaccagggagctggtgtagccggtcatcatggcgatgaaaccggcaaccacggccgacgcagacgtatcggccaacgggcgcaaaggcgcttgggtagcatcgttcatgcaaaggtgttcctttttacctgagagggtgcgggatcaagcctaaacttaaacgtaacaacccattgcaatacagccggggctgcaaatagccgtacagtgtgttggcgcattcggttgtgtacaatgtgccctgtttttaggtgatacttgccagcaacctgttgttgcagtattaccgttaattcgccgccgttctccaaacccgagtgcccatgaacgaacagttgcaacctctcaagaaacaaccgcgagccggcaaggccggacgcagcggaacccaggacgatatcgtctacgcgcatatcttcgaggcgatcctcgaacaacgcctggcacccggcaccaaattgagtgaagaggcactgggcgaaatcttcggcgtgagccgcaccatcattcgtcgcgcgctgtcgcgcctggcccatgaaggcgtggtgttgctgcggcccaaccgtggtgcggtggtggcaagcccgagcgtggaagaagcgcgccaggtgttcctggcccgtcgcttggttgagcgggcgattacggagttggcggtacaacacgctacagccgagcagttggccgagttgcgccagatggtcaacgatgagcgtgacagcttttcacggggtgaccgcggcgccggcatccgcctttccggcgaattccacctgaaactggccgaagcggcgaagaacgcgccgttgatcagtttccagcgcagcctggtgtctcagacttcattgatcatcgctcagtacgaaagcggcaaccgctcgcactgttcctacgatgaacacacccagttgatcgacgcgatcgaagcccgcgatgcggcgctggcggtgaacttgatgatgcatcacatggatcacatcgacagcaagctcaaccttgatgaagagagcgcgtcggatgatttgcatgcggtgttttcgcatttgttgcagaccaagaagccggggcgctcttcgatcaaactctgaccccaataaaaatgtgggagctgggcttgtgtgggagctggcttgcctgcgatgcagacacctcggtctttcagttagaccaaggtgatgccatcgcaggcaagccagctcccacaaaaggcccgctcccacatttgttttgtggtgtttgttggattagcgctggtgcaccaactgccccgccgcatacgtctgcaacaccgtccggtcatcccccagcgtcatcagcacaaacaacgtctcggcaatgttcttcgcttgcttcaagcgatagctcagcagtggcgtggcgttgtaatccagtaccaaaaagtctgcatccgtgcccggctgcaacgtaccgatcttgtcttccagccgcagcgcccgcgcgccgcccagtgtcgccagatacagcgacttgaacgggctcaaccgcgcgccctgcaactgcatcaccttgtacgcttcgttcaaggtttgcagcagcgaaaagctggtgccgccgcccacgtcggtgcccaggcccacattcaatttgtgcttctcggccatcggcaagttgaacaacccgctgcccaggaagaagttcgacgtcgggcagaacgccactgccgaaccggtctcggccagccgcgcgcactcgtcgtcacacaggtgtacgccgtgggcaaacaccgagcgttcgcccagcagtttgtagtggtcgtacacgtccaggtagcccttgcgctccgggaacagctctttcacccactcgacttcctgcttgttctcactgatgtgagtctgcatgtagaggtccgggtattcgcccagcaattgcccggcgagttccagttgctcaggtgtgctggtcggggcgaaacgcggggtgaccgcatagtgcaggcggcctttgccgtgccagcgctcgatcagcgccttgctttgctggtaaccggattcggcggtgtcggtaaggtagtccggcgcgttgcggtccatcatcaccttgccggcgatcatgcgcaggtcgagcttctcggcggcttcgaagaacgcattcaccgactgcgggtgcacgctgccgaagaccagtgcggtggtggtgccgttgcgcagcagttccttgatgaaaatatccgcgacttcttcagcgtgcgccttgtcggcgaactggctttcgcacgggaaggtgtaggtgttcagccaatccagcaactgctcgccgtaggcgccgaccatgccggtttgcggcaagtggatatgggtgtcgatcaagcccggggtgatcagcgcgtcctgatagtgggtgatgtcaatatcggcaggcaagctcggcagcaagtcgccggcatggccaacagcgctgatttgcccgttttcgatgaccagcaggccgtcttcgaaatactcgtaggaggcttcgatccccacttcagcagggtcggcgatgctgtgcagaatggcggcacggtaggctttgcgagtcaaaggcatggtcgtctcaattcaaatggcttggctgcgacgtgaagccggcagcagtttggcaatgggttcggcgctcgcagtgtgctggccgaaattcgcgttataggtggcgatgatttcgccggcgatggagatggcgatctccaccggcaatttgcccttcacctcggtgaggcccatggggcagcgcatgcgttgcagttgcgcggtgtcaaagccgcggtcgcgcaggcggtgttcgaacttgacgcgtttggtcttggagccgatcaggccgaggtagctaaagtcacctcgtttgagcagggcggcggtgagttccaggtccagcgcgtgattatgggtcatgacgatgcagtaactgcccgccggcaggtcggcaatttcgtcgaccggctcttcgctgacgattttacgcacgccctgggggatgtgttccggaaactcctggtcgcgcgaatcaatccagcgcactcggcacggcagactcgccagcagcggcaccagcgcacggccgacatggcctgcgccaaacaccgcaatctgcgcttgcacctggcccatgggttcgaacagcaacaccgtcacgccgccgcagcactggcccaggctggcgccgaggctgaagcgctccagatgggtattctgctggccacgcacgagcatgtcgcgggcgatctgcatggccttgtattccaggtgcccgccgccgatggtgtcgaaggtctgcgcggcgctgatcaccatcttcgaaccggcgttgcgcggcgtggagccgagctcttcgatgatggtcaccagtacgcagggttcgccgcggttttgcaggtcggcgagggcgctgatccagtaattcatagtcacctcttgtggtgtctgggagggcctcatcgcgggcaagcccgctcccacatttgaatgtattcacagatcaaaaggtgggagctggcttgcctgcgatggcagcacctcggtctaaagcgaagccatctcggtttcagtctcaacagccttcgccgcctgcaactgccgcatctgctcacacccccacaacactcgctccggcgtcgccggcgcatcaatctttggctgatggcgatagtcgcccaggctcgccaccgcatccttgatcgcgcaccacgaggcaatcccgagcatgaacggcggctcgcccacggccttggaatggaacaccgtgtcttccgggttcttgcggttttccaccagcttcacgcgcaggtccagcggcatgtccgccacggccgggatcttgtagctggccgggccgttggtcatcagcttgcctttgttgttccacaccagctcttccatggtcagccagcccatgccctggataaagccgccttccacctggccaatgtcgatggccgggttcagcgaggcgccgacgtcgtgaagaatgtcggtacgcagcatcttgtattcaccggtcagggtgtcgacgatcacttcgcagcaggccgcgccaaaggcgaagtagtagaacggccgaccgcgtgactggctgcggtcatagaagattttcggggttttgtagaaaccggtgctcgagagtgagacctgggcgaaatacgcctgctggatcaaggcctcaaacgtcagaatctgatcgcgtacccgcacgtgaccgttatggaattccacatccgcttcgctcacgtcgtacttgcgtgcggcaaattccaccaggcgctgcttgatggtttcggcggcattctgcgccgccttaccgttcaggtcggcaccgctggaagcggcggtcggcgaggtgttgggcaccttgtcggtgttggtcgcggtgatctgtacgcggtcgatatccacctggaacacttcggccaccacctgcgcaaccttggtgttcaagccctggcccatctcggtaccgccgtggttcaggtggatactgccgtcggtgtagatgtggatcagcgcaccggcctggttaaggaagctggcggtaaacgaaataccgaacttcaccggggtcagcgccaggccttttttcaggatcgggctgtgggcgttgtacaggcggatcgcttcgcggcgctcggcgtattggctgctggcttccagctcggcggtcatttcttcgagcatgttgtgctcgacggtctggaagtagtgggtgacgttgcgctcggtcttgccgtagtagttggccttgcgcaccgccagcgggtccagcgccaggtggcgggcgatggcgtccatcacttcttcgatggcaaccatgccctgcgggccgccgaagcctcgataggcggtgttggacgcggtgttggtcttgcagcggtggccgttgaccgtggcgtcgcccaggtaatacgagttgtcggagtggaacatcgcgcggtcgacaatcgagttcgacaggtcgggcgagcagccgcagttgccggccagttccaggttgatgccgtgcaggcggccggtgtcgtcaaaacccacgtcgtattcgatatagaaggggtggcgtttgccggtcatcagcatgtcttcgacgcgcggcaggcgcatcttggtcggctggccggtgaggcgtgctaccaccgcgcacaggcaggcggggctggcggcctgggtttccttgccaccgaagccgccgcccatgcggcgcatgtccacgacgatcttgttcatcgacacgtccagcacttcagccaccagtttctgcacttcggtggggttctgcgtggagcaataaacgatcatgccgccgtcttcggtgggcatcaccgaggagatttgggtttccaggtagaagtgttcctggccgccaatgtgcagggtgccctggatgcggtttttcgccgtcgccagtgcaccggccgagtcgccgcgttggtgggtgtggctgtcgagcacgaagtgctttttacggaaggcctcgaccacatcgagtacgggttcgaggtcttcgtattcgatgacggcagccatcgccgccttgcgcgcggtttccagatcgcgggctgcaaccgccaagaccacctggccgacgaactgcacggtgtcgatggccagcagcgggtcgcccggcatcagcgggccgatgtctttcaggccgggcacgtcttcgtgggtgatggcgatgcgcacgccttcaaaggcgtagcagggcgcggtgtcgatgctgatgatgcgcgcgtgggcacggtcggacatgcgcgcatacaggtgcagttgattcgggaattccaggcggtcatcgatgtactgtgcttcaccggacacatgcttggcggcgctgtcgtgcttgacgctgcggcccacaccggaggtgaggtcctgtgcgaacagctcggcgagttcggcctgggtttttaccacggcgtgatggttagacataagcggtcacccgagtctcgatgtgcggtgtttgcagttcgatgaagtacttgcgcagcaggttctgtgcgctgagcaggcgatattccttgctggcgcggaagtccgacagcggggtgaaatcctgggccagggcggcgcaggctttctcgacagtggcggcgttccaggtcgcgccgatcagcacggtttcgcagtttttggcacgtttgggcgtggcagccatgccgccgaaggccacgcgggcatcgctgattacaccgttgtcgagcttcaggttgaatgcggcgcagacggcggaaatgtcatcgtccaggcgtttggacaccttgtaggcacggaacagcgcatggcccttgggcacgatgatcttctcgatgaattcgctgtcctggcgcgcggtaacgcggtagtcgatgaaatagtcttccagcgccagcgtgcgccgggtgttgcccttgcacagcacgatttgcgcgccgagggcgatcagcaggggcggtgaatcgccaatcggcgaggcgttgccgatgttgccgccgagggtgccctggttgcggatttgcagcgaggcgaagcggtgcagcagttcgccgaagtccgggtattcgtggtgcagcgcggtgtagcagtcggagagggcggtggcggcgccgatttccaggcgatcgtcgaaggcctcgatgcgcttcatttcttcaatgttgcccacgtagatcatcaccggcagcgtgcggtggaactgcgtgacttccagcgccaggtcggtgccgccggccaacaggcgggcttgcgggtaggcgtcgtagaggtcggccaggtcggcgacggtgagcgggacgaggcagcgtttgtcgccgctgttgagttcaccggtttgcgtcggcgcgatggctttgagctgggcgatggtttcggcctgacggctgtcgaactggtcctgaggcttgttgcagcaggcctgctcggcggcggcgagaatcgggcgataaccggtgcagcggcacaggttgccggccagggcttcatgggctttctggctgtcgggggcgtcgctgtttttttgcaacgcgaacaacgacatcacgaaaccaggcgtacaaaagccgcattgcgagccgtggcactcgaccatggcctgttgcacgctgtgcagttggccctggtgcttgaggtcttcgacgctgatcaactgcttgccgtgcaacgacgacacaaacgtcaggcaggagttgaggctgcggtagcgaatctgctccgcgcctttttcatcggtgtgcaactcgccgaccaccacggtgcatgcaccgcaatcgccgctggcgcagccttccttggtgccggatttgcccaggtgctcgcgcaagtaattgagcacggtcaggttagggtccagggcgtgctcgctacggagttccctgttaagtaaaaactggatcacggaaggcctcgcagactcattattgttgttaaccgctttgcgccgaatctagtcatgtctgacttttcggtcaatgattttctgaccagaaggtcaagaaattgcagttacaacctattcaattatggttcagtcttctggaactggcgttttcaggggcttctggcttttaatcgctgcgtgtttcatgccaaattcgcccccgtgggcccagcgccatcaggcagcatttgcgctacactgccgcgcttgtgccgatagaagattttgaagggtaaacatgacgttcaaggcgccggacagtctcgccgagcaaattgctcaccacctcgccgaacgtatcattcgcggcgatctcaagcctggggagcggatccaggagcagaaggtcacgctggcactcaacgtcagccgtggttccgtgcgtgaagccttgctgatcctcgaacgccgccacctgatcgcgatcctgccgcgccgtggcgcccacgtcaccgaactcaccgcgcacaaggtgcagagcctgtgcacgttgatgggcgagttgtacattctgctcggcaatgcggttgccgaaggctggcagacccaggccgacatgacgccgttcctgcagatccagcaacgcctgatcgccagtttcgagcgccaggacatccgcgcctttgtcgaagaaagcttcaatgtgatgcgcgccgcgtaccccttcgccgacaacccgtatttgcaagaaaccatcgataatctgcagccggcgatgaaccgcgcctattacctggcgctggaccaacgcaaagcgtccatgagcgagtacctggaattgttcgagcaactgctcggcgccgtgctggcccgtgacttgccgcaaattcgtcaagtgttgtcggcttacggccagcgcagttgctcgctggtcatcgctgcgttggcggacgcctaagcgtgcggctcaagtgcatcaaactggcggggttcaaatccttcgtcgacccgaccacggtgaacttccccagtaacatggcggcggtggtcgggcccaacggttgcggcaagtcgaacatcatcgacgccgtgcgctgggtgatgggcgagagctcggcaaaaaacctgcgtggcgagtcgatgacggacgtcatcttcaacggctccaccagccgcaagccggtgagccaggccagcattgagctggtgttcgacaactctgacggcaccctggtcggcgagtacgcggcctacgcggaaatctcgattcgccgcaaagtgacccgcgacagccaaaacagctacttcctcaacggcaccaagtgccgtcgccgcgacattaccgacatcttcctcggcaccggcctgggcccgcgcagttactcgatcatcgagcagggcatgatctccaagctgatcgaagccaagcccgaagacctgcgcaactttattgaagaagcggccggcatttccaagtacaaggaacgccgccgcgaaactgaaaaccgtatccgccgcacccacgaaaacctcgcccgcctgaccgacctgcgcgaagagctggagcgtcaacttgaacgcctgcaccgccaggcccaggccgccgagaagtatcaggaatacaagggcgaagagcgccagctcaaggcgcaactgtcggccctgcgctggcaggcgctgaatgaccaggtgggccagcgcgaagcgatcatcggcacccaggaaatcagttttgaagccctggtggccgagcaacgcaatgccgatgccagcatcgagcgcttgcgtgacggccaccatgacctgtccgagcgcttcaatctggtgcagggccgcttctattccgtgggtggcgacatcgcccgcgtcgagcaaagcatccagcacggccagcagcgcctgcgccagttgcaggatgatttgaaggaagccgaacgcgcgcggctggaaaccgaatcccacctgggccacgaccgcaccttgctgctgaccctcggcgaagagctggacatgctcacccccgagcaggaaatcaccagcgccgccgccgaagaggctgccgccgcgctggaagaatccgaaaccaccatgcacggctggcaggagcagtgggacacgttcaacctgcgatccgccgagccacgccgccaggccgaagtgcagcagtcgcgtatccagcagctggaaaccagcatggagcgcttggctgaacgccagcgccggatgcaggaagagcgcgcgttgctcgccgccgacccggaagatgcggcgatcatggagctgagcgagcaactggccgaaagcgaaatgacgctggaagacctggaagccagcgaagaacagcaagtggagcgcctggagcaactgcgccagcaactgcaacaggcgacccaggcgcagcaacaggcccagggcgatttgcagcgactcaacggtcgactggcctcgctggaagccttgcagcaggcggccttggaccctggcaccggcacggctgagtggctgcgtgatcagcatctggctgagcgcccgcgcctggccgaaggtttgaaggtagaagccggttgggagctggcagtggaaaccgtgctcggcgcggacctgcaagcggtgctggtggacgattttggcggtttcgacctggccgggtttgcccaaggcgatctgcgtttgctcagccccgccgccgacggcacgcgggtgccgggaagcttgctggataaagtcgaggccgcgattgatttgtcaccgtggttgggccaggtcaaaccggttgagtcgcttgaacaggcacttgcgcagcgtggccagttggccgccggtgaaagcctgatcagccgcgacggctattgggtcggccgccacttcttgcgcgtacgccgtgccagtgaagccgaaagcggcgtgttggcccgtggccaggagatcgtcaacctgatcgccgagcgcgaagagcgcgaagccacgctggaaagcctggaaaccgaactacaaaccctgcgcgccacccagcgccagcaagagaccggccgcgaacacctgcgccgtctgttgcaggacgaggcgcgtcagcaaggcgaattgaaagcccagctatcggcgagcaaggccaaggtcgaacagttgaccctgcgccgcacccgccttgatgaagaagtcgccgagatgggcgagcaacgtgcgctggagcacgaacaaatcggcgaagcgcgcctgcaattgcaggaagccctcgacagcatggcgctggacaccgaacagcgtgaactgttgctggcccagcgcgacagcctgcgcgagcgccttgaccgcgtgcgtcaggaagcccgtcagcacaaggaccacgcccaccaattggcggtgcgcctgggttcgctgaaggctcagcataattctacggctcaggcccttgagcgcctggagatgcagtccgagcgcctgactgaaaaacgcgagcaactgagcctcaacctggaggagggggaagccccgctcgaagagttgcgcctcaagcttgaggaactgctcgacaagcgcatgaccgtcgatgaagaactcaagaccgcgcagatcgccctggaagatgccgaccgcgaactgcgtgatgccgaaaaacgccgcacccaggccgagcagcaatcccagctgatccgtggccagctcgaacaacagcgcatggaatggcaagccctgaccgtgcgccgcaagaccctgcaggaccagttgctggaagacggctacgacctgcacggcgtgctcaataccctgaccgcccaagccaacgagaaggaagccgaggaagaacttgagcgtattgctgcgcgtattcaacggctcggcgcgatcaacctggcggccatcgacgaataccagcagcagtccgagcgcaaacgttatctggatgcccagaacgccgacctggtcgaagccctggacaccctggaaaacgtgatccgcaagatcgacaaggaaacccgtaatcgcttcaaagatacctttgatcagattaatggtggtttacaggcgttattcccgaaagttttcggtggaggcagcgcttacttggaactgacgggcgaagatctactcgatacaggggtaacgatcatggcgcggcctccggggaagaagaacagcaccattcatttgttgtccggtggcgaaaaggcactgaccgcattggccctggtgtttgccatcttcaagttgaacccggcgccgttctgcatgctcgatgaagttgacgccccgctggatgacgctaacgttggacggtacgcgcggctggttaaagagatgtcccagaccgtgcagttcatctatatcacccacaacaagatcgccatggaaatggccgatcaactgatgggtgtgacgatgcatgaaccgggctgttcgcgtctggtcgcggtggacgtggaagaagcgatggcgatggtggaatcctgaaccgggctttgaaagagaatttccggcaggatgcagggtaaatgacccggctgtgaaatatggcaaatggacatatttgttcaaggcattttgacagacggtgtaaagttatctttggtcgtgctagtttaatgtcaaattttcgtatgcgtgggcaaaacgtcagtcagaacatagagttggcgccacgttttaaagcggtttggatgttgctaaaccccttatttttcagcattttttattagaggcacgggattacatggaaatcggtctgcgcgagtggctgatcgtcatcggcattattgtcattgccggtattctttttgatggctggcgccgcatgcgcggtggcaagggcaagctcaaattccgtctggaccgcaacctgtccaacttgcctgacgacgacggcagcgccgagctgctggggccgccccgtgtgctggacacccataaagaaccgcagttggacgaacacgacttgccgtcgatgagcgcgccggtgcgtgaagcccgtgaaccgtcctccaagcgtggcaagcgcaacagcgcgccggttgccgagccgcatcagggcgatttgaacctcgatgtggatgacggcccgagcttcagcagccgtgatgacgatttcccggacgaaaccccggccaagagcagtgcgccgcgccaatcggtcaacgaccaacctgctgccgaagaagtgttggtgatcagtgttatctgccgcgacgctgccggcttcaagggcccggcgttgttgcagaacattctggaaagcggcctgcgttttggcgagatggacattttccaccgccacgaaagtatggcgggtaacggcgaagtgctgttctccatggccaatgcggtcaagccgggcacctttgatctggacgatatcgacctgttcagcacgccggcggtgagcttcttcctcggtctgccaggcccgcgtcatccgaaacaagcgttcgacgtgatggtggcggccgcgcgcaagctgtcccaggaactcaatggcgagctcaaggacgaccaacgcagcgtcctgaccgcccagacgattgaacattaccgtcagcgcatcgtcgagttcgagcgtcgcgccctgacacagaaacgctgaggttcgatcttaagcgttgtctgtagaatccgtgcactaacatattgagcagcttcggctgctcttttgctttatgagagaacacccatgaccgccgcccacacccgcatcctcgaactgcgcgctgaactggatcagcacaactaccgttaccacgtccttgacgagccgagcattccggacgccgagtacgaccggctgtatcacgagctcaaggcacttgaggccgagcatccggagctggtgacgcgggattcgccgacgcagcgggttggcagtgcggcgctgtcggcgttcacccaggtcaagcatgagattcccatgctcagcctcggcaacgcgtttgatgaaaccaccatgctggagtttgatcgccgggtgaccgaaggtcttgacctgccggtgggcgacctgttcggcggcggtgcggccgtggagtacagctgcgagccgaagctggacggcctggcggtcagcctgctgtatcaggatggcgagctggtacgcggcgccacccgtggcgacggcaccaccggcgaagacatcagcgtcaacgtgcgcacggtgcgcaatatcccgttgaaactgcacggcagcggctggccggcgaccctggaagtgcgcggcgaagtgttcatgtccaaggccggtttcgagcgcctgaatgccgcgcagctggaagtcggtggcaagaccttcgccaacccgcgcaacgccgctgccggcagcctgcgccagctggactcgaagatcaccgccagccgcccgttggaattctgctgctatggtgtgaccaccgatatcagcgacagccatatcggcaacctgcaacagctaaagaaatggggcatgcccatcagccacgagctgaagctggccaaggggattgcggattgcctggactactaccgtgatattggcgagcggcgtaacagcctgccgtatgagatcgacggcgtggtgttcaaggtcaacagcattgcgtcccagcgtgagctgggctttcgtgcccgtgaaccacgctgggctatcgcgcataaattcccggccatggaagagctgaccgaactgctcgacgtggagttccaggtcggccgtaccggcgctgtgaccccggtggcgcgcctgaagccggtgaaggtggccggtgtgaccgtttccaatgccaccctgcacaacatggatgaagtggcgcgcctgggcgtgatgatcggcgacaccgtgatcatccgccgcgccggtgatgtgattccgcaggtggtgtcggtggtgcttgagcgccgccccgagactgcccgtgccgtgcctgttcccgagacctgcccggtctgcggttcccatgtggagcgtacgcaattggtcaagcgcagcaagggcaaggaaaccgtcagcgaaggcgcggtgtaccgctgcgtcgggcgcctggcctgtggtgcgcaactcaagcaagcgatcattcactttgtttcgcgccgcgccatggacatcgacggcctgggcgacaagaccatcgagcagttggtggatgaaaaactcatcggctcgccggcggacctctacaagctcaagtacgagcagatcatcgacctggaaggctttgccgatatctccagcaagaagttgattaccgccatcgaaaacagcaagacgccgaccctggcgcggtttatctacgcattgggcattcccgatgtcggcgaggagacggccaaggtgttggcgcgttcgctggcctcgcttgagcgggtgcagaaggccttgcccgaagtgctgacctacctgccggacgtgggtctggaagtggcgcacgagattcacagcttctttgaagacagccataacaaagaagtgattaaagaccttctgtccaaggacacatgtggccttgaactgcaggaacagggcgatctgagtgccgaatttgctgcctgcactacgttgggcggctttttggacaaactacatattccttctgtcgggccgggtgctgcgcaaaagctggccgataaattcaagtctctggagctgttgataggtgctcaaaggtttgatatccgcgaagtgctgcctgaaaagcaaaccaagacagttagagatttttttgataacgaggaaaatgctaagcgagcccttgatattgagaaacagctcaaggacttcggcatgcattgggacagcgaaaagaaagtcgtcgaaggtttgccggaagccggccacacctgggtgctgaccggctccctggaactgatgagccgcgacgtggccaaggacaagctcgaaagccttggcgccaaggtagcaggctctgtttcggcgaaaacccactgcgtagtggcgggcccgggcgccggttcgaaactggccaaggccaccgagcttggcttgaaggtgctggacgaagaagcctttgtcgcctttctggccacacacaacatcaccgtctgacccgatcctgtagtgagggagcttgctcccgccgggctgcgcagcagccccgtcaggaaaatgaacgatctcttcccgcagatgatctagtctctgtcatcaggggagagaccgccatgttccgctacttcgagcagctcagttcacgcatcgccgcaccgttcacggcaggctcgtcgcgcaacagcaaggtctggcagtgccgttgcgggcaatcgctgttctttcgcaacagccagtgcctggcctgctcggcgctgctgggctatcagccgcaacaaagccgcctgtcctccctgcaaccggggccggtcgccgatacctggttacaagatgacaacctcaacgccggggccttccgccgttgtgccaatctcgatacccccgccgcctgcaactggctgatccccgcccacagcaccgcgcacctgtgcgtggcgtgcagcctcaaccgcacaattcctgacctttcgatcgcggaaaaccccgagcgctggcgcaaggtggaaaccgccaaacgccgcctggtggcccaattgataggcctgggcctgcgcgtggtgcccaaaagcgtcgacgaggaaaacggcctggccttcgactttgtcggcattgatctggaaggtaacgcgcccatgacgggccacgccaacggcttgattacccttgatatcaaggaagccgacgatggatgatgacgctctcttactgcggtttgcgtttcattcatctggtgatccaggaagagtgtggccgggcggacgaggtagtccaggcgcaatagccgctttctgtgggagctggcttgtcgaatcgtcgcaccgctgcgatagcatcacctcgatccaactgaccgaccgcgtcgcctgcatcgcgggcaagcccggctcccacaggctgcggtgtgcgttgcaaggcagcaggcaagtgcttgaaccatcgaatgtttttaatccggaaccaacagttgtaacttccgatgagatcggtacaatggccccgcttgccgagaggcaggcgtcgttatggtgaccccatcggtccccccgcaacgattacccgtgaacctggtcagagccggaaggcagcagccacagcgggaacattgtgtgccggggtgtggctggtggggttgcctccataacgctcctccttgcagtacccctctgttccaaatcaaaatttcttgttcagtcatctgccgaccttcattgcgcagtcgatgacggctggacaacgccaagccgcctgctagcgtcaatcatgcaaatgaccccagtgctggagtagtgaagaagtgatggcactcaattcctgattaaggatgattgccatgaccagcgttcaaggtttgcccctttctatcaaggcgtccgtcggtatatcaggcaaggctgttaataaccctgccgacgtgcgcagcattcagcacctgttcaacctgatcaaatccgcgtccgatctacccctggtggaggacgggctgtccggccccaaattggtccagcgtattaccgcgtaccaggttgcccgcctgaaggctaaaaacccggatggtgtgattgatgccaatggccagacgttcaagagcctggttgaagatgcaggcaaggcaggctcggcgggccaggcgccaatcaaggctgggggcgatcaaaagcaatggctcacagaggtcacgtgtgacggtggcgtgaccctgaccgatgcagatttcaaaaacgcagccgccctgctgggtaacgggatttccgtgaacctgatcaaagcgtttgccatcgttgagtccggcgggcgttccgggttcggccccgccaaacttcccgtgattgcgtttgaagggcacaccttccgaaagtacaccgagcaactgtatgacaaggcttaccccttgctgtcgtacccttacctggtaaaagcgggcccgcaatggaaggctaacaacaaagaccaggccactgcatggcggaccctggctgatgcgttcaagctggatccggaggctgcgctgaagtcagcttcctacggcatgtttcaaatcatgggcttcaactctggcgcctgcgggtacaagaatgtcaccgattttgtcgtcgcgatgaagctcaacgccggtgagcaattgaaggcgtttgtgggtttttgcagtaagaatccggctctgatcaaagccatgaaaaacaaggactatgcgggaatggcacgtaactataacggggcagatttcggcaactacgacaaacgcatccagaaagaatacgaggcgcttgagaagaaaaaatagcggttacgctatgagtggccgtttgttgctgcgcagtgatagctgcctcacagctatcactgcgacgctcggtcagtggcttggcgaatagccagatttcgtgcaaatgagggtgccagccgttggccgctccccacgtgacctctagcgcccggatcgatccgatggattcgtacagttcgcggcacgtgcggtagtcgcggccacgtttcaaccgtttcagcgcgtcgcgcagaatgcccatcatgtccttgagcttgtcggtccgggtgtgcggaaaggtcagggtgaccatttcacaaccgccgccagcggccacatgggcgtcaaggacgccgcgaacctcaagtttgcgccgttcgctgattttcgccgcgcacaccgggcaggcccatacagacccgcaggtctgtaacccggaaaagtggcatttgctgttctcgacagacttgaggaccgcaacgtctccgacgccgttggtcagatgctggaggcacttgctgacccggtgacccggcaaaagccgtgccgtggccttctgcaaaacgtaccgcgaaaaacgggcgtccgaagcgtccgtttgcaacacgtattcgcgacgctttgaattgagcgtaaaccgttgaatttccccggttttttcgcaaattacctctctgattttgtcagaggatttcgcatctataccaagggcgcttcgcgcctgcccacgacccgccgtcgcactcgcgtcctcgcggtgacccgctccgggcgctcgcgctccttgcgggtcgtggttgattgttgctacagcttcccctagcattgatctcgttcctgttgctcaccggcggcagaacacccgaccttgcgaaagtcggaattcagagcgatacccaaaggccctgcttgcaacagggcctttttcttgcccgccgtttgcccgtctctacggcggcactgggtcaagaaaaggctgaatcctttgggtatcgcgacgtgagcttatagccctcgcctgtacatcgtcaaaagaccttgaccccgaaactgacgcgcttcgcttgtcggctcccgcaaaacagcgcagcaagctgcactgccttgcgggagctcagtttaaaaaccggggcaaaggtcgggaacttttcacttaacgtcgagcctttcggccttgaaaccaatatcgcggatcatgttcaaggccgcactcaatgacttgaatcggcgcgtttcgcgatcacgagtactgatcagcatgtaggtcgagctggagcgcagcgccgatcggaacatcacgcaccactcgtccgacatcggctgacgctctaaccaggacgaagccagtaagccgcggtcaaagtcgcgcttggcttctgcaaaggtcagggtgtcttcggctaaattcatgtcaaaaatctctcgtatctggaggcgagctgcgctcggtcggcctgtagccttggggtgaatttatgtcgtttttactatttcgtcaatgcaaattcatattttcatcatctggataacaagcagaatctcagacttgctagattccttgaccttggaacgaaaaatcgagggcaggaacgacaggccggtctggctctccgaggttttttcctcagtcaggccacccaaaataaccacctcggcattgcgcatctgcacgttcgtggtcaattgacgcttggtcagcgtcgggctgttgttcacgccgttggtggtctgtacgaagttggaaagctgctgatcaatggtcagatccaccaccgcttggcgcacctgcggagtgatggtgaaaatcacgccggagttacggtattccacggactggacggcttgaccggcaccttgcggatacgacaacgcacccagcacaggaacttcggcaccgacgttgatcgtcgcttctttgccagatcgcacgcgcaagctcggctggctgaccaccttgaaccgcgaatcggacgacaatgccgacagcaccgcgttgaagtcgccggaactgatcgtgaccgaattgtcgagcgggttaccggccaaattgatcgacaccttgccgttgagcaatgacgcagccaacgaaaacgccgaaccatcacgatcaccggtctgaacctcataaaccgcactgcgcaacatcacttcgcccatttcgatatcgacctgaggcaacagcaagcgcaagtttgcaatctcggccttactgccaacgaaaaccagctggtcagcatcacgattaagcagactggccgccgatccacgcggagcagatccgctcatcggtgtttgaccaggtacagcaattccgcgatcaacactgaacttaccctggaacaacggggacagcgtttccgacaaataggcaacatcgcggtaaagcggtcggtacaggaagtattcaccaggtgcaggagtcggttcctttttgggcatgacagtttcgaccccattacgctgagttaccgaatagccaaaggcatcgagcagacggacgaaatcggcacgcacctgagcggcagtaccttgaacccgcagcgaaacaggacgccgatcctccagcacttcgggcgagagaatgaacggcttctggaacgcatccgaataaaaaatctgagcaacttgaccaatcggcagaccggacaaatcgaatttgtacggcggttcagccgccaaaaccgcgaaagaaagaaagtaactaactaacaaactaactaaacgagtcatggggttttacctggcaatggaaccgaagaagtggcgggaggcttggagccgctaaacgtgctgacgcgctggccatccagatcaccagtcataacgcggcccgaattgcgaaagttgctcggatgctcataacgaacaacgccgtcaccgttcaccaggacaacttgccgttggttgttaacgacgatttccccagcaatacgccaatcgctggaaaacgcctgagaagccgcaggagacgaggaaggggttgaagggccagcttgacccgcaggagcaccgttaacgggctgcttaacgacgggagagggtgcagcaccgcgattaaagaaatgcagcaccccccaaaccgaaccgataccgccgaaaacgatcatgaacaggaaaatccagaccttcgggtttttcaggatgttctgacgatcatccacctggacttcattgccggtaccaccggcatacgacgaatacaacgcaaaaatttccgggtcgtacttcttattcatcacatcgacacgggctttggccgcctgtttccagccttcccacatctcgacccggtaaattttgtgaagacccagcgactttattttggtggtgcgaaacgacagctcgaccaccgttttcaagattcggttcaagtcggaaatatcctgaaccatcaacaccaggtcacaggtaacgccggttaccgggtgcgcgtaatgacgatgttcgcggaagaaaatcttatgctccgtgcagatcttctgatcagtaccccagaaacgccaagcctcgtcgatacaaaccaaatcgcccggttgcacgagggtatcgaccgtcgtgccatgcgggagaaattcaggtttggacacatcgtcattcgagcagtgcacaacctcaccgagtttctccagggcaataccctgtttctcgtggacgtatgcacggatggcatcggaatcgatggcatcgacgttggtaacgacccgacggccttttgcaaccgctggaacgatgaccgaagcgacacactcgtaacttttgcccgagcccatcagcccggtataggcgttgataggcattagccgattaccggaattcgacgaatcaaaaagcgcgtgaccagtgccgcgatcagcagaggcacgccgttagaaaatgcgaacagatcgaggaagtaccacgtcgccgcactgaaaccgccaaacgccgaagtaagaccggcaccagtcggaagccacgacgccatgacacccaccagctcggcaacgatccagtacagagcaaccatcaccacgaatttgaccaggacaccgcgaaccaaccagcccagcagcgcgttaccagcagaaagcagaatgccgaacataaatcacctcacgccgaaaggacgataaacagggccgcgatgatccaagcgaccaaactgccgttgtagagcgggccgcgcacaccctcaaacaaagtgcactgggcatccatgcgaacgcgggtatgcagaacggcaatatcgaattccggcttcggacattcgccctggtgcgcaggcacctgaaagttttttagatcaggcatcaggccggtaatcggcgcgagaatctgcgatccagtaggagtgggctcaagattgggtgaaccaatgcccggatcgatgccgaggtcgagtttcggagttccctcaggcgcggtcggaattcccggcgtcggattggtgacttgaccaggtgttgtcaccggaaccgttccggtggacggattcaacgccgaagaaacggcatcaccgacagacggatacgaacccgggttggaagcctgccatgcctgaacgtcggcaacggtcacaggatcggtatacgagtacggcaacccctgataacccggctgagaggcagcttgttgccacgcttggttggcaatatcagcgattatttttggatcaacaggtaacgccttctgctcaggcgtcaagtcatcaatggcgagttcaggcttcttggtttgttgcgacggaccagttccgggaatagaaacagtggtgcacgaggaaccgttagccacctgcccgttaccgcagttaccagaaaagcttccatgcagccaaataggcacaagagagccggctttgttgccagaggtccaacattgagcgctagtagcgccagtgctctcacacacagaaggaggcgcgccccacgctgggtcaccaccagtccagctaaggaaataactgactgcagctgccgaaggggtagttgcgttccagcaccccaactgccaagtgctagagccacacgtcgaataatacggctgtccttgggtcagttgaccaggcacgccaccagtacccgcaaccgcatacgtaaccgtcccatcaccattgaaataccaactaacggcggcatccagagcgagcgaaacggcaccggcagcgagcgcacccaaaccgatggtgacccacagaggggcaccggcagcggccacgacaccagtagcggcagcggttaaaacagcacccgtcgcagcaagagcagaattaaaccgagggtcgttggccgcgaagccacgctggatagccttgcgttccatcacaccaccgaccgcctgacccattttcgccgagaacgcaggggccgcagaggcaaaaaccggaacgaacagcagcgcgaacaggagcgccttcttgacgaaaaacagcactagtaactttttcataggtcgttatccgcgtaaccagtgattaccgcccaggcacacaacaggccgaagacgaacatgagcaaataccaggcgtcattggtggtcataagcacccgctccgatgataaaaagtcgcttttgactgggcgttttcactgtttcatcttcctgaaggcgaaaaaaaaggggcacgccgaagcaatgcccccggtggggatcagcgaccgcggatcatgcccagaaccatcgaagcggctttggaagtcgcgtagatggtcgccagaacggcgccgatggccagaatgcccgcaaccacatcagcagcagtgaaagcgccggtgatggtggtcaggtcgatggcagccgaagcggagccagaaacggtggcagcaacaacaccagcggatacagcagcagcggagaacagttgtttcagtttcatggttgttacccttgcgaaataaccggcatccggccggtacggcttacctcaacgacggcgtatgaggttcaagatggttcccacgccgcgcgcagtcagccaaaaaagcagcacagtcccgaacgcaaacgaccaaaaggcaaatgcctgggtgtaatcgaacggtgcggcagcagcttgaacggcggcgaattcggagggagtcagcaacaggtaagcggaacacgtgggttcgctggtcgaggtgacgaatccattcgcgtcaatgacagcgcaggcggccatttatcaggcgctctttttcagtgcggcatgctgagaaaaggcgtcgatatcggcgacgtgggttacagaaatcagggtcaaggtcggcttgccgtccttaccgggcttggaaccgtaatcgaggtcgaaaacggcaggcaattttgccgctttcagctggtcgaacatggagatatcgccggaaaccttggtaggtttcatgcccactgccagggcagtgtcatcgcggtaatcgttgacgaaccagatcgagacaccacggcgcaattcgccagtgcgctcatcgaccatttcccatttgtcagccgaaagaatcagtccacgttgagccatttttccttacctctatgcgattgcccggagttttgagaagctgcccttgggcggttcagggtgcttgacggtatgctgaaggcctgattaatcaatgtcaagagggtttaacggtggctatacgcgatcagctacacgacacgtcgtactggttggaggaggtgaagcagcgctgcggctgctcaagtgacggcgagctggcccgcctgctcggtgtcactaaacaggcggtatcgatgcagaaggcgggaaaacatgaaatgagcgtcaagcaggccgtgaaggtctccgagctgctgaagtgcaatcccatggaagttatctgcggggtgatgtttcaccaggacgttatggagcgggatttctggacggacattttccagcagacagtgaccgaaaacgaccgtcgccattacttcaagaaggtttaggcaggctgtcgaggtaggtacggacggcatcgaaaccgccgttttcggcaagggtcagaaccatggcccttgcttcgtacttcaagcgcaaaattgcacgccattcgtcgtgtgtgatccggataatctcactggccttgtcttcctgcagggctgcaatttcttcatcggtgatatcggccacgccgaacaaggccttaagccccggcgaccaaaaaagttgacgataaccatgaaacgcctcgacgtattcggcaaaaagcgcaccggcacgagcattgccctgggcataatcgcgcaacagatcgaacggggttcgccccttctcactacgactttttttgatgttcgccttggtcaattcactggccgcttcccacctcggctcagtgccccatttcgcgatgtattccgccgctgacgaggctggctgcacggtcacgccgcgtttgcggttcggagcgggaaaaccggccttgatacacgcagtcttccagccggcaaacagcagaccctgcaagttacggcgctgacgctcggtcagtggcttggcgaatagccagatttcgtgcaaatgagggtgccagccgttggcctctccccacgtgacctctagcgcccggatcgatccgatggattcgtacagttcgcggcacgtgcggtagtcgcggccacgtttcaaccgtttcagcgcgtcgcgcagaatgcccatcatgtccttgagcttgtcggtccgggtgtgcggaaaggtcagggtgaccatttcacaaccgccgccagcggccacatgggcgtcaaggacgccgcgaacctcaagtttgcgccgttcgctgattttcgccgcgcacaccgggcaggcccatacagacccgcaggtctgtaacccggaaaagtggcatttgctgttctcgacagacttgaggaccgcaacgtctccgacgccgttggtcagatgctggaggcacttgctgacccggtgacccggcaaaagccgtgccgtggccttctgcaaaacgtaccgcgaaaaacgggcgtccgaagcgtccgtttgcaacacgtattcgcgacgctttgaattgagcgtaaaccgttgaatttccccggttttttcgcaaattacctctctgattttgtcagaggatttcgcatctataccaagggcgcttcgcgcctgcccacgacccgccgtcgcactcgcgtcctcgcggtgacccgctccgggcgctcgcgctccttgcgggtcgtggttgattgttgctacagcttcccctagcattgatctcgttcctgttgctcaccggcggcagaacacccgaccttgcgaaagtcggaattcagagcgatacccaaaggccctgcttgcaacagggcctttttcttgcccgccgtttgcccgtctctacggcggcactgggtcaagaaaaggctgaatcctttgggtatcgcgacgtgagcttatagccctcgcctgtacatcgtcaaaagaccttgaccccgaaactgacgcgcttcgcttgtcggctcccgcaaaacagcgcagcaagctgcactgccttgcgggagctcagtttaaaaaccggggcaaaggtcgggaacttttcacttaacgtcgagcctttcggccttgaaaccaatatcgcggatcatgttcaaggccgcactcaatgacttgaatcggcgcgtttcgcgatcacgagtactgatcagcatgtaggtcgagctggagcgcagcgccgatcggaacatcacgcaccactcgtccgacatcggctgacgctctaaccaggacgaagccagtaagccgcggtcaaagtcgcgcttggcttctgcaaaggtcagggtgtcttcggctaaattcatgtcaaaaatctctcgtatctggaggcgagctgcgctcggtcggcctgtagccttggggtgaatttatgtcgtttttactatttcgtcaatgcaaattcatattttcatcatctggataacaagcagaatctcagacttgctagattccttgaccttggaacgaaaaatcgagggcaggaacgacaggccggtctggctctccgaggttttttcctcagtcaggccacccaaaataaccacctcggcattgcgcatctgcacgttcgtggtcaattgacgcttggtcagcgtcgggctgttgttcacgccgttggtggtctgtacgaagttggaaagctgctgatcaatggtcagatccaccaccgcttggcgcacctgcggagtgatggtgaaaatcacgccggagttacggtattccacggactggacggcttgaccggcaccttgcggatacgacaacgcacccagcacaggaacttcggcaccgacgttgatcgtcgcttctttgccagatcgcacgcgcaagctcggctggctgaccaccttgaaccgcgaatcggacgacaatgccgacagcaccgcgttgaagtcgccggaactgatcgtgaccgaattgtcgagcgggttaccggccaaattgatcgacaccttgccgttgagcaatgacgcagccaacgaaaacgccgaaccatcacgatcaccggtctgaacctcataaaccgcactgcgcaacatcacttcgcccatttcgatatcgacctgaggcaacagcaagcgcaagtttgcaatctcggccttactgccaacgaaaaccagctggtcagcatcacgattaagcagactggccgccgatccacgcggagcagatccgctcatcggtgtttgaccaggtacagcaattccgcgatcaacactgaacttaccctggaacaacggggacagcgtttccgacaaataggcaacatcgcggtaaagcggtcggtacaggaagtattcaccaggtgcaggagtcggttcctttttgggcatgacagtttcgaccccattacgctgagttaccgaatagccaaaggcatcgagcagacggacgaaatcggcacgcacctgagcggcagtaccttgaacccgcagcgaaacaggacgccgatcctccagcacttcgggcgagagaatgaacggcttctggaacgcatccgaataaaaaatctgagcaacttgaccaatcggcagaccggacaaatcgaatttgtacggcggttcagccgccaaaaccgcgaaagaaagaaagtaactaactaacaaactaactaaacgagtcatggggttttacctggcaatggaaccgaagaagtggcgggaggcttggagccgctaaacgtgctgacgcgctggccatccagatcaccagtcataacgcggcccgaattgcgaaagttgctcggatgctcataacgaacaacgccgtcaccgttcaccaggacaacttgccgttggttgttaacgacgatttccccagcaatacgccaatcgctggaaaacgcctgagaagccgcaggagacgaggaaggggttgaagggccagcttgacccgcaggagcaccgttaacgggctgcttaacgacgggagagggtgcagcaccgcgattaaagaaatgcagcaccccccaaaccgaaccgataccgccgaaaacgatcatgaacaggaaaatccagaccttcgggtttttcaggatgttctgacgatcatccacctggacttcattgccggtaccaccggcatacgacgaatacaacgcaaaaatttccgggtcgtacttcttattcatcacatcgacacgggctttggccgcctgtttccagccttcccacatctcgacccggtaaattttgtgaagacccagcgactttattttggtggtgcgaaacgacagctcgaccaccgttttcaagattcggttcaagtcggaaatatcctgaaccatcaacaccaggtcacaggtaacgccggttaccgggtgcgcgtaatgacgatgttcgcggaagaaaatcttatgctccgtgcagatcttctgatcagtaccccagaaacgccaagcctcgtcgatacaaaccaaatcgcccggttgcacgagggtatcgaccgtcgtgccatgcgggagaaattcaggtttggacacatcgtcattcgagcagtgcacaacctcaccgagtttctccagggcaataccctgtttctcgtggacgtatgcacggatggcatcggaatcgatggcatcgacgttggtaacgacccgacggccttttgcaaccgctggaacgatgaccgaagcgacacactcgtaacttttgcccgagcccatcagcccggtataggcgttgataggcattagccgattaccggaattcgacgaatcaaaaagcgcgtgaccagtgccgcgatcagcagaggcacgccgttagaaaatgcgaacagatcgaggaagtaccacgtcgccgcactgaaaccgccaaacgccgaagtaagaccggcaccagtcggaagccacgacgccatgacacccaccagctcggcaacgatccagtacagagcaaccatcaccacgaatttgaccaggacaccgcgaaccaaccagcccagcagcgcgttaccagcagaaagcagaatgccgaacataaatcacctcacgccgaaaggacgataaacagggccgcgatgatccaagcgaccaaactgccgttgtagagcgggccgcgcacaccctcaaacaaagtgcactgggcatccatgcgaacgcgggtatgcagaacggcaatatcgaattccggcttcggacattcgccctggtgcgcaggcacctgaaagttttttagatcaggcatcaggccggtaatcggcgcgagaatctgcgatccagtaggagtgggctcaagattgggtgaaccaatgcccggatcgatgccgaggtcgagtttcggagttccctcaggcgcggtcggaattcccggcgtcggattggtgacttgaccaggtgttgtcaccggaaccgttccggtggacggattcaacgccgaagaaacggcatcaccgacagacggatacgaacccgggttggaagcctgccatgcctgaacgtcggcaacggtcacaggatcggtatacgagtacggcaacccctgataacccggctgagaggcagcttgttgccacgcttggttggcaatatcagcgattatttttggatcaacaggtaacgccttctgctcaggcgtcaagtcatcaatggcgagttcaggcttcttggtttgttgcgacggaccagttccgggaatagaaacagtggtgcacgaggaaccgttagccacctgcccgttaccgcagttaccagaaaagcttccatgcagccaaataggcacaagagagccggctttgttgccagaggtccaacattgagcgctagtagcgccagtgctctcacacacagaaggaggcgcgccccacgctgggtcaccaccagtccagctaaggaaataactgactgcagctgccgaaggggtagttgcgttccagcaccccaactgccaagtgctagagccacacgtcgaataatacggctgtccttgggtcagttgaccaggcacgccaccagtacccgcaaccgcatacgtaaccgtcccatcaccattgaaataccaactaacggcggcatccagagcgagcgaaacggcaccggcagcgagcgcacccaaaccgatggtgacccacagaggggcaccggcagcggccacgacaccagtagcggcagcggttaaaacagcacccgtcgcagcaagagcagaattaaaccgagggtcgttggccgcgaagccacgctggatagccttgcgttccatcacaccaccgaccgcctgacccattttcgccgagaacgcaggggccgcagaggcaaaaaccggaacgaacagcagcgcgaacaggagcgccttcttgacgaaaaacagcactagtaactttttcataggtcgttatccgcgtaaccagtgattaccgcccaggcacacaacaggccgaagacgaacatgagcaaataccaggcgtcattggtggtcataagcacccgctccgatgataaaaagtcgcttttgactgggcgttttcactgtttcatcttcctgaaggcgaaaaaaaaggggcacgccgaagcaatgcccccggtggggatcagcgaccgcggatcatgcccagaaccatcgaagcggctttggaagtcgcgtagatggtcgccagaacggcgccgatggccagaatgcccgcaaccacatcagcagcagtgaaagcgccggtgatggtggtcaggtcgatggcagccgaagcggagccagaaacggtggcagcaacaacaccagcggatacagcagcagcggagaacagttgtttcagtttcatggttgttacccttgcgaaataaccggcatccggccggtacggcttacctcaacgacggcgtatgaggttcaagatggttcccacgccgcgcgcagtcagccaaaaaagcagcacagtcccgaacgcaaacgaccaaaaggcaaatgcctgggtgtaatcgaacggtgcggcagcagcttgaacggcggcgaattcggagggagtcagcaacaggtaagcggaacacgtgggttcgctggtcgaggtgacgaatccattcgcgtcaatgacagcgcaggcggccatttatcaggcgctctttttcagtgcggcatgctgagaaaaggcgtcgatatcggcgacgtgggttacagaaatcagggtcaaggtcggcttgccgtccttaccgggcttggaaccgtaatcgaggtcgaaaacggcaggcaattttgccgctttcagctggtcgaacatggagatatcgccggaaaccttggtaggtttcatgcccactgccagggcagtgtcatcgcggtaatcgttgacgaaccagatcgagacaccacggcgcaattcgccagtgcgctcatcgaccatttcccatttgtcagccgaaagaatcagtccacgttgagccatttttccttacctctatgcgattgcccggagttttgagaagctgcccttgggcggttcagggtgcttgacggtatgctgaaggcctgattaatcaatgtcaagagggtttaacggtggctatacgcgatcagctacacgacacgtcgtactggttggaggaggtgaagcagcgctgcggctgctcaagtgacggcgagctggcccgcctgctcggtgtcactaaacaggcggtatcgatgcagaaggcgggaaaacatgaaatgagcgtcaagcaggccgtgaaggtctccgagctgctgaagtgcaatcccatggaagttatctgcggggtgatgtttcaccaggacgttatggagcgggatttctggacggacattttccagcagacagtgaccgaaaacgaccgtcgccattacttcaagaaggtttaggcaggctgtcgaggtaggtacggacggcatcgaaaccgccgttttcggcaagggtcagaaccatggcccttgcttcgtacttcaagcgcaaaattgcacgccattcgtcgtgtgtgatccggataatctcactggccttgtcttcctgcagggctgcaatttcttcatcggtgatatcggccacgccgaacaaggccttaagccccggcgaccaaaaaagttgacgataaccatgaaacgcctcgacgtattcggcaaaaagcgcaccggcacgagcattgccctgggcataatcgcgcaacagatcgaacggggttcgccccttctcactacgactttttttgatgttcgccttggtcaattcactggccgcttcccacctcggctcagtgccccatttcgcgatgtattccgccgctgacgaggctggctgcacggtcacgccgcgtttgcggttcggagcgggaaaacctattagcggtgcgtgatagtgacctggtaatgcgcgagctggcgcaaacgaaagcatccgtcattgaagctcaacgggtgctcatcgttggcgctggctcgatcccgaagctgcttggcgagctgaatgccagcctggcagacctcggttatgtgtgcgtgccgctggagcccgcgcaaggcctgtacaagacatttggcgacctgctggcgtgtccatcgctggcgccgttgttgcaagagcactctattgagcctgctgctgtagtccaacagcccgcagcacctcctgagttatcgctggagattgccggcgccggtgctgagcctgagcggcaccagccagcgcccgccccgccagacttgccggtggtggatgtctcgacgctcgacatgagcaaaccgatgaactggaaggccggggacgtgtttgtctccaatccccgtatcacgctcccccaccagcgtcgtaagtggctgctcgacttcctggacctatccgacctggataatctgaccggggtggacgtacaaatcagaagccccaacaccatcactactgagctgatgacgctcaagcagtttatggctcaatacgtctttctagagcgcccggccgccgagcaaagcgccgccgaataggccagtttagacccctcaaaatatgggcttgcataccactatgtaggcccgtacccatgccccttaatgcgattcaacaagcccggagcaccgcgaggcttttacagctgcacgcgccgctactgtcgggcgaactcacacccaccgaacgaatgcgggccacggccgagaccattgacctgcatgcggcgctgctcgacgccgttcctgttgaaaatccactaaacgctttagagctaatgcgttatagcgccgaattgctgaccgtgcgcgccaacctggaggccggcaagctcagcgctatcgagcaggtgcgagccagtgccagggggctggagttgcgcggcctgcttggcagttcaggccctgcccgtcggccgcaacgccggcgccaggcgtcaacagccaaggctgtgaccacgctgattactgaaaaggtgccgcagaagaacggcggccttctggttgtcgggaatgctgaggcgctggacagctacgcgcgggcctatctcgatcaagccaaatacaccgtggcgcctaccggcttgctgttgaccaaaagccaggcacgactggcagagcacctgccgaatacacaggaggctctgccgtccggggcggtgattttcagctatgccgatatcggcggcgtttctgtggccgttggcggtgagctgtcaggaatcgcgcgcgaccttcctgcactgaaaagccaaatggctcagcgatggggccccgaaaagtacctggccgtttttggtgagacggcggcgccggccgatgtacaggcctaccgggaagagcaagcgagcattacgcagcgcaaagcggacagcgccgccgcggagcttgaagccgctggcgccccgcagcgcgcgaaggacgaagccgaggcgctggccaaggccaaagcgatagagctggagcaggtccgcgccttagctgatcaagaaaaccgtgactatttcgcggccaccgccggcgccggcgtatcagacaaccctatctaccaggcttatctagacaccctggagcaactaccagattttcaaggtggacatgcagacttcttgggctgggcgaccgtgcgtgccggcgagtttgagcgccagagcaaaggccgtgtgtcatccgacagagaggggcacttggcatacgttcgccagtgggcggatgagcatctatcgcagcgtgtgaaggacgccagggcggcagctgagcctaaaccagaagcggcagcatccccccaacaccagatcattgagtacaccaccaaaaagcagaaggttttgcgcggggttctgcgcacagacctgagcctggctgacgcgaaggccatcgacccgtacacctggcgcatgaacggcggctatttcattcgtgaaaagtacttggagggggacaccagctctatccaggcggccccggcgccggtggtgctgtctccggagcaggaagcggaaaaggccgccagcgatgcccggcacgcagaagagcgtcgtgtatgggcgctgggtatccaggtcgagaagcttcgcacagtcgccaacaaggcggttgagagcggcgaagctggcatgaatcaggatcgcaacaccaacaccgccaggcgcgccgggatggccgccagtgcaatcgccaaggctgctgcgaaccacgcggacggtcggacgctcaacaatattgctgacgcaatcgaagccggtgccgcgggcctgctgaccaagctcaccagtcgcgtgcaactgggcgaaatacagcgcgccctgcgcctggcgcagtacgaaactgaccgagggctgagttacagcgcccagctgagccgaaaagggcgaccgttcgacgagaacgacctgaaaaacattgccatgcccagccaggtaacgtgggccagccgcttttcggatgcagcaaaggcaatcgagaagttaaagcccattggtaacgggcgtctgattgttgctttgaaaaagatgggcgcccgccctgagcggtttgccatgcgcgccgaggacgcggccattacccgcaaggcgaacgaagtgcttaagggcacccgagactcgcatgttctcgctgatccggtggaaagcattgcccgcctggaccggctcacccggatggggatcacggatgtagccacgctgcgtgaggcggcgcgtgagctgctgccgttcatggctgcaaaggccgaagagagcgcagtcaaaaaggctgagcgggcaatcattggccagaaggtgggaatcgactttttcccgacaccggcgcatgtggcccagcgcatggccagcttggcgcatatcagtgaaggggtgcgtgtacttgagccaagtgccggcaatggcaatctggcggacgcggcaaagtccgccggtggcgtggtggacgttatcgaaatttccagccaattaagggacatattgacggcgaagggatacacggtggtggaccacgattttgagggtttcacgcctgatcagccttaccaggccattttgatgaacccaccattttcgcagcgtcgggacgccgcccacatcatgcgggccttcggaatgctggcgtctggtggttacttggtagccattgcaggggagggcgtgtttttcggtaccgaccaaaaggccgtcgacttccgggcctggctggacactcacggcgccacggttgagccgctggaagagggcactttcaaagacaaggatctgctggcgcaaaccggcgcaaatgcccgattgatcgtgctcaagaagtaggccgcaaacccgcagaaaccatgcaaacccccgccaaaaacgggggtttttggcacttaacatcatttctgaaacgaatcgggcgcagcccaccatcatcagaaatgaggttacacatgcctacgaacacttacgcgcccgactccggtttgggtgaagttgccgcaaaagttggcgctctggttggtgccgcccgcggcagcaatggcaatatgctggatagcctcagcgctccggcagttgatgcggtaaaagaagctgttgccaacgccggcaagctgttgcccgctcgcatggctcggctgctggacaagatcgacggcgacgccaatcgcgctttcgctgttacctctctgctggacggcatcaccagctttgagcgcaagtgtggcttctccccgtccgccgacatgctcgacgccgttatctcccaggctgaaaacttggctgacggcaaaagcactcaggtgctgcctgacggcgccaccctggacagcatcagcaccaacaacgcatcggccaccctgtcccaccagccgaaccgtatcgccggcgccatcactggcggcctgagcgaggccattccgttcggcgcttatctgccttcggacctcagctctaacgagtcgaagctggccatcatcacctccattactggctccaacttcggcgcttacaaggaaggtgacattatcgacggcacctctggtggccgcgaatacacccgctccgaacgtgttgtaagtgttgtggttaatgccgaccgcaccggtggcgccttcgctatcacgtcgcagattgctggcgctggcgtgactgtgccgttgctgcgtagccgtacctcggttgccgtgaacggtttcaccgttgcttacgagcaggcgaacaactccggtaccgatacctcgctgatttccgggcagttcaagcagcacggcgaatcctacgtcatcaacggcagcgtcaatgttaaaaccggcgccggcaccctgacgttcaacccggctctggcggccgatatcgacgtggaagttcaaggtttcatcgacttcgaggccaagcctgagctggcgccccgtatcggcaccattgcgcagagcttcagcctgtattgcgcgccgtcccgcctgatcatgcaggccaccccggattcgcgcagccagtcccaatcggaattgggcgcggaccgtctgaccatcgctgtacaggccgcccgcacccagctggcgaacgagcgctacattgctgccctgcgtaaggtccgcaagctggccaagaacaccagtcgcacctacgacttcaacgcagccgagcagctgacactcaaaacccgttcggacgccctgcgcgacctgggttcgttcatcgcggctgtcgaccaggacgttgctaaccagaccatggaattcggtctgagcttcttctacgtcggcgccatcggtatgtcccagttcctggccattgaaagcggcgccgactttgttccgtcgggcctgccttcgaagcctggcatctggcgtgtgggccgctacaagaacaaatacgacgtttactacagcccgtacgtcgtcgaagaaaccgacaccgatatcgagattctgtgcatcggtcgctccccgcaagtggcgcgtaacccgattgtcttctcggacgcggtatcgccgaccctgatcccgctggcggtcaatgccgacctgaaaaccggcgctgcgctgttctcccgtcagttgaccgaagtaaacccacaccgccagtcggcactgggctgcgcactgatcaccatcaaaaacgtgtacgcactgggctaactgggggctgtcatggctgcgaaaactggagttaaaccagcggctaaacccgctggcgcaaaacccgcagcggccaccaaggcaccgggggctgtggagaaatccgcagccccaccgggctctggcgggtctgctggaaatagtgagagtgaggctgacaaggctgctctcgaacagcttttcagtgacctggtggatgaagctgaacgcatgaaccgggagtgggatgaaaacgccgctcaggtgctcgctgggcatatggccttgctggaagacgaggcgcgggcgatggactcggaattcaacgagcttgttctgctggaaagcgaggcctgggccatggatgcggccctcactgagagcctgaaaaccacgcaaaccactgccgaaaccaccccggacagtgccgtaacgttgccggtgtgggcgcttcccgaaattggcgagttcccggccactgtcatcctcgaaaaccatacccgaaaccgcgtcggcgtacctggcgctcatgtcgctctggacccgtacgagagcgtcgaggtcacggtttccctggagcagttcgccaagctcgccaagtcgctgaccagcagcgcgcgggcacacaagtgggacaacctcaaaggcttacaggtgaaatatgaccgtaaagattgatcgaaacgcaggaaaagcgccccacgccctcgttgacgcgttggttggcgccctgagctttcccctcctggtggtgctcaagcacaagaacgacaaaccgttggtgattccttcctcgggcatcaacacccctattgagccaggcatcgccacgacggtgaaggtgaagagccgtgaccaggcttggatgctggttagcgatatttccgaattcgccagccgtgcaggtaacgattccgacgattttgccgttttggagccgctgccggtcgaaggcattcccgagaaatccccccagctgtcccaggaggcccaggccgacgcggcaccagctgatccagccagtggcggcgttaagcctgtcaaaatcaaggaggtcaaataatgtccattcctttttctcgtaccattgataagcgttcgggcgtacagctcaaccaaatcaatgacatgtcggaaaccccaagcaccagcaccgtagcgcacaacatggccattaccggccgttttgctcgcggtcgcatcgacaaggtttttgcggtttcgcgcaacaagctcaagcgcaccctgggggccgcgcagtccatgtcggtcagtgcactgggtgagccctacgtgcacatccaggaagcgctcaagtccggtaccgtacaggctatcgtttctcgcctggtgagcgcagaagccaccaacaagctcatggtggcgtccgtaccagctcctgcacctgagggcgccgcgcccgcaccggtttggactctggtaaccgaagctgccggccctaccggtgaatatctggtagctatcaagcacctggaatgtttctccgaaggcgtcagggctgaaatccacgcagacgccgccgttggcgcagacggcaagcctgcggcgtccaaaatcatcgtcttgcaattgcgtgacgtgaacaccaatgaaatcgtactcggcccttacaagggctcgcttgatccggcggcgcgcgacgagttcgacaagagctttttcatcggcgatatcgtggcgcaattcaccgaccttctggaagtggtcgaggtgaacactgacgctgccgtgcctgtgacttgtgcgttctacggtaaaaaagacaataaagacgcatacgcttcggctgtcttggtcccattcaccgaaggctccaagctttacaccacgtctgaccttgacgcggccgtcgaccgtatccgtcgctcccgtccgacctttacctacatcggtagcggcggtaccgagagcgtggcgctgatttcccggctgctggagctcggcaaagaaatcaacaagcaagtcccgtgggatgtgcctggtcgtttcactcccgcagctgccacgacgttttatgaatctgttggcggggctgccgacagcatttacagccagtgctactgggcgcctatcagcgccacgaacccggcggcgggcggtaaggcctttatcggtacctcgggactgaatatcggcttgcgttgtgcacgtaacgctcagaccaacgccaagggtattgctccgcgcaacgtagtgatcgccggcagtgatttttctgtcagccgcacgaacatggttcagacctacgagccatccgatgacgagctggagctgctggcggcttcgcgtatcaacccggtgctgttcaaggattaccagagcggcggcaaatatgcctggatcgactccctcaccggtgcgcagaccgaaggcgccaccaagcttattgcggtggtggaaatggctacttatgtcgacgacaccctggcatccgccgctcaggaagcgctgcaaaagcccatggccaaggccatcgagaaaaccaccaagtttgctggcaatttcctggagtcgctgcaatcggcaggttggttgcagccaagcgctgagctcgatggcgcctgttactcggccaccatccaggcgaatgcaaatcagccattcgaaaaaatgaacatcgacacgtccatctgctacgacggtacggctcgtatcatcgttcagcagcagtccgtcgtccgcacgtaaggggatcaacaatggataagttactgcaacacgtactcaacaccagcgccgcggtaagcctggcctacgcgccaaaggctgccgaagttcctaaaacgccagacttgccgcttgatccactggtggcggcaatgcttgacgcggtgaagcccgaaaatgccccggccgctctctacaccgaagaaatgcgccaggatgcggtgaacattgttcaagaatgggcagagtctgacctggaagcgggcgaaggctttggcgaccgtctgtatgcgctgattgtcggtagtgctaccgatggtgatgacgacctgactgatgatgaagccgactatgccgctgccgtggccgagctggtgggcgattatctggaagggaagggcatcgaagctgctgacgtggattcgctgctgggcgatgatccatcgtttgacaacgatgtggccgctcgtattcatgatgccttgctggataagctcccgcagggtgatgacgccatgctcgacgatgctgacaagttcgtcagcggtgatgacgatcaaatgctcgatgcggtttacaagaaggtcgtggccattcgcggcggcctgaaagttcgcatcaaaaagcgtgtcagcggccgcgtccgcctgacggccgcacagaaaggcgccatccgtaaaatgcacaaaaaagcattctcgggtgcggcgaagatgaagcgcgcgaagtccatgcgcctgcgtcaacgcctgctgggcaagtaaaacatggccgactttagcgttgacagtcttggcaaaaccgtttcgggcgccatccagggcgcaacagcgccggctgccgggagcacgtcaaacaccttgctagggtcggccaccaaattcgtggggagcggcgccgctggcgcggcttccgggatcttgaaagcgggcgtttcgacctttgacggcatggtcggcggcaaggccaaccgccaggcgttggagggcgcggcaaatacagtgacgggcaccgtctctgacctatggtcgggaaagacgaccgtgggggctgtatacgactcggcgtctgcaaaggtcatgggcttggtggaaggggcaaagaccgccgacccatctgcactggtgggcaacatcacgggcagcattggcgagtatttgccaggcctcaaaacgttgagctccgacctggggggcgactggggcagattgtcgcctctgttgctggtgcgcctgtttgtctgcaatgccaaaggcgtggccgacatcaaggaattcaccggcgtttacgcggcgatgaaagaaggctcattcgaagcccagcaaaattgggtttcgccttttgagagcactgggccggaaaccaaggctcctgcactggccggcatgcttcaatctggctcattggtgccggtcctgaacgcgctacaggctatttcaccgtttaaggatggcgcgatagcggacacgctcaattcaggctctgacaagctcaagagcatcatgcgtgatcttgaggggcgcaccggtatcacaaagctgaattcacgccaggtgttttcgggcatgccaccagtgaaggttaacttcactttgcacttccgggcggtcaaagacgcattgaccgaggttgaagcgccattgacgcgcctgcttgagtgggtgtttccacaagagctggccgaagacggcattttgtctgaggtgctgaaaaccaccaacgatatcgagtcgtttattcaggccctctttccatcgaccgctcccaagctgctgggcttcacatacgccggccgtacttggtcacccatggtgattgagagcgtgacgtttcccctggatgcgccaaaaacgtcgcaaggctatttctccgacctgccagtgcaaatttccatggccacgctcacggcgctcgaccgccctgacatcaagcgtttctttggtcgataactcgtcgaaaaccttgcaaaccccgcccgttcgcggggttttttgcgtgtgacgattgcccggagtgatcaattctcaagaggtgacgtatgacagttagcagcatggcggttttgagccgcacgtttcaaaacaccaatgatatcggcgccaaggctgtccaggcggacgcctgcctggtgatcgatgaattcccggacatgatgctgctgttcaagcagttcccttggccagtagctactgcgggcgctgtgattgagtacttcgggccgctgggtcaaaagatgggccagccatcccagaacaaaaccatgcaggaaggcccggtctcgatctatgaaacccgcctcaaccatgccggtgagttcctgaaacagctgattgcaatcggcggtgagttcaacggtaccgtctacgcgggtcgccctgacgactacacccgcaaagaagatttgaagaagtgcatgctgattatcgacactcctgatcgtgactgggagaacgatacgcaggttctgatgctctccggcaccatgaccttccactggtttcagaaccaataaccatgaagctcagccaattagttgagcagtaccttgctgatctgccgattggctgcgtgcttaccgaagagcaaatagcccgcagcctgcgcaacgcaacaaggcagtactgcggctatgcactgctggccagcgccgaatcactcgatgtcgtcggcgccgcacctggtggtgtcgacgttgatttgtcagacagtgagctggggattatccagccgctgtggacgctgtacctggagaaagaaaacgcgcttgccctggaggcatcgaaaagccagggcgcggagctgtttgggcgcagtgtgtcagaggtcgtgccgtcgatcctggagtatgagctttcgctgcctcggctggcgttttcctacgccgtaaggtcgatctgatgggcaacatctttgagcgcttggcttaccagggattaagtgccgtggcgcctaagtctggtctgagcgggaaggtgctcaagtacagcaacgccgccaggaacttgctcggcggtaacttgagcggcgccgccaacggcctgatggataacgttttcgggcgctccagtgtcttctccgaaggcggcaacatcattctggccggccaaagctggcaaagccaacttgagatgttcgaagaggcatcgagcgtcttgcgtgagcgtacgaacctttggcacgtcggcgtagatccggtgggaaaagtgtcggcgccccgggtcaatctgctggccacagaggtttctttcaacagcatgcagcttgggtatgagccggtaaaaatcggttctggcttcactcaagcgcccacgggcgccgacccgacggaattgcgcctggtttgctacgacgttagcggtgaaatcaaaacttggtttgaacagttgttcaccctggccgcgcatccggatggcactttcgggcttcccaccgactacgccaacacgatcactgtcacccatggcgcggtcgaggaaggtcgtggctactccaagtcctgggtgctgctgccggtctcgtgcgaagtcaacctttcgcgcagtacggacgatttcacggcccttaatctgtcattcacccaatacgacaccttggggactttatgaagtacatcaatccaataaacacgcgtcgtatctccgttgagatgtccgaaatggccatcgaagacgtggaaaagctctgtgaaatcccttctgtttatgaccagcgcacggtgagcgaactattgcgcaggatctgcaaaccgattgatcggcccaacgccgtatctgacccgcgtttctggtccatcaacgagcgtatctacgtggtggccagctacatggcagccacgcgcgatgacggccccgacttcccggtaggtgcaagcgatagcagtggccattttagtgactatctgctgtctgacactgattacgtggccgatatcccgttcacttacggtggcgactcgctgttgttcagtccgctcctgggctatcaggccgagattatcgaagcgctgatcgccggcggcacctacaaggcgaccgactacagctggtggtgtgccgcgatggctgcgtgcgtgcgtgacgctggtgaagagcccataccgtataccgacgacgcgagctacgaggctgagctggtaaagcgaattgccacggtccgcagcatgccggagtccacgtttgtcgggcttttccaggcctaccttggcgccacgatggcgggcgcgcacctggtgcacgcaatcaccagctcctacggcgtgattgcttccccgatcactgagccaaaagagggggagccagagttagcacctgcccgatttcctgcccattcctgcatcagcttcggcgcgcgtcaagttatgggattcgtataactccgtcagggctgagctggcgctgtacttcggccaagacctgacgcagtgcggaaagatgacggaaaccagaattcgggcgctgttcgacagcaagccttttagcaactggaaggcctcccgagaaaacgaaaacaaaggggtccaggcaaccatcaatcgcctggatgcggtcattaaatcactgggcaacgtggcgcagatcatcgccaaaaaaggcgtgtgaatgacgcaaaccagccgccggcggctggcacaaagccatagacaatatcggtaattaaccatgaccagatggaataacgatatggccgctgacgtgcagcgaatcatggacacaccgctcgccaagctcagcctcggaattgcccaggcgggggccgtagcgctgcttatcggcgtatgcagcagcatcaccacgaagctcgacaacatccagaacactgttaaccaaagctcgcgggacatggctctggttcagaacgatgtgcggcgcctggagacatcgcccagcgagctgcgagctgagcagtcgtccggcgaaaagcgcacctctcgcctggagttcaaggttgaacagatggaaaaggaccgggccaatgaccgcagcaaataaggcgccagtgccggcgacgttcaaggatttgctgcgccagaagttgaagccgcacaacaaaaccatttttgccatttgcctggtgctcgatgccttggtggcgctcatgacgctgtacagcgattcgccgccgttcgacgcaattatttatggcgctctatcggcattcgtgaaggcggccaacgtagggcttcattacctcagcaagacgattcagggagacgattctgatgcagaacaacaacagtaaggcgccggccgccagcgcggccgatatcgacattctggcccgaaccttgtggggcgaggctcgcggcgagagtcaggcaggccaggaagccgtggcatggactatccgcaaccgggtattcgatgggaaaaccaattcatggtggggtgaaggctacgcgggcgtgtgccagaagccgtggcagttcagttgctggaacgccaacgatccgaactcgccttatttgcgcggcgccaagcctatcccggccggtgagtacaagaaggcggtggccgctgctacggccgtagtgaatggcgcaattcctgacccaaccaatggcgctacccactactacgccaccaccatgcccaagccgccgacctggatcaaaggcgcaacccaaacgctcaagctgggccggcacatcttcttcaagaacgtcccatgaacttagcctttcagctgcttgcaggcgtattgctgctgatgcttggtgccgagggaggccgctggcttgccaccaaccagtaccagccaaagctcgatgccgccggtgtcgagctgggcaaagtcacatcttcacgcgacaacctgctggcgctcactaccgagcaggggttgaagttgggcgaattggtgcaattggggaaagagcgtgaactggcagctgacaaggcccaaagcaacgcccaggtagaagcaaactcccaatacgcggccgcgaatgagctcatgagagggcgtacgggcggcgaccagtgcgcggcggccgaggcgctgatagacctggagttattcgggaaatgaaaaatctgatcattttcgcgacattattggttcttgctgggtgtgccgataagccgcctcatctggtccccgctatccgcgtacccgtacccgtccccgtcccgtgtagaacgaaaagtgtggaggtgccagcgtttgccgctgagggtatgaagaaatcagaccctcttgaggtaaaagtgcgcgccctgctggccgagcgccggcagcggatggggtacgaaatcaagctgctggcggcgaacgcggcctgtcaatgagatatggcgtcaaagccctttagagtcaaagagctaaagcgtcaaaacgccaaagcgctaaaaaaggaaaggggagcattacgctccccgctccttttttaggcgtgggcgctcattgggtaatgagcgcccgagtgcttttcgatgcgggccggtggagcgctgcgctccatcacgtactttgcccagcggtccatcattggcctgcggcgttccaatagattgccccggttgtaagcccgcgtggtggcattgccgacggcatgcgacagggcaacctcacaaaggtcggacggaaatttggttttctcgttgacccaggatgtgaacgtggtgcggaagccgtgtggcgtgctcgtttcgccgtacttgatcagaacacgacgcatggcgttgttcggcatgatcgcttcaagtgtgcggttgggaaaaatgaacttgctcttgccgcgggtgtgcacgtccttgagcacagccatagccgcgtcactcagcgggatctggtgaattttgcggtttttcatccgcaccgctggaatgttccatgtcttggtttcgaagtcgatttcatcccactcggcgcccatcgcttccccgctccggcaagctgtcaatattacgaattgaaggcagcgggcagcgcgggttacatcgccctcaagtttttccataaagccaggtaaacgagagtagggcattgactccaggtgaacagtctcaggtacagcgcgagacaggatgttttgcaggtggccacgccaccgggctgggttctcgccctcacgattaccgcgggttttggcgaagtccagaatcagctctatgcggttgcggacgcggcgagcggattctggcaattcttgccaaattgggtcgagcacggacaccacagcatcagtatccacttcgcccacgggcatgtgcccaataatcgggaaaacatgatcacgcagtgagctgtgccactgagcagcgtgtttttctgaccagccatgtttgtaacgctcgatgcgttcaagcgcttcatcttgaaaagtaagggtttttttgacttcctggtgcttctcagccaacgggtcgatcccgttgttaatttgcacccgcagttcaaggcatgcggcgcgagcatcggccaacgacacgagtgggaattttcccaggcccgcgtcgtggcgtttgccgtttatctggtaccgaaagatccagaattttgcaccgctcggggtcactcgcaggaataagccatgcttatcctggtaagaggccgggatggtgatgttttggatagccttctgcgtgagagccattttggttttaccttttatgcgcgatttgtaaggtgcagcgttctgatatccatttcgtgagtgaagaacagtgtgtgcagctagacagttttggattttgccggggaatccgacacgtaacctttcagatagtgccgaaagtacgagggatatagtatccccgatcagacgcctggaaacccccggaagggctggcctctggcgtaagtggggtgaggtgttcccacactttgccccacactaaaccgtagaaggttcgcggggcgcggcgcgggtatattttaggagggggaatacgatccgacgagcggtatgtttaaaacggggttttttttgctttggtcgcgtttaagtagttcaaatatcggtcattgccgccgaaaaggtcaatcattcgggccgcgtgctgacgttctgccatcatttgccgttcaaatcggtcggcttgctgtttggcctgattttgtgacatgcgcgtgagcccttggccaacgtccaccggcagctggtagccaaccgtcatgctcagcgccaggatgacggtaaggagcgctattctcaggcgcttggccagcgcctgccccgcgacagtcacctgtttcaaagggtgcagcgctgagtagacgtacatcaggccgatggccaatacgagtatggcaattgatggcattcgtttatcccttaaattcgaactgaatgagccagcaccacgggttgctctccgctggggtgctggggtggttgcgtgcccaatatttgtgaaagtcggccttgctggcatacccgcaggcctgccagtcgtgctgaccaaggttggtaaagcgcgcgatgtccaagcgtctcacgcgcccggtaccgaacctggcgtgcctttgcgggggaagctcttgcagcaagtcgaaggcgtttccttgctgaatgggggcgatatcgcggccgatgactccagccctgaaagccatacgtactgcgcccatgagccctattgcgtcatccacgttcaagccacatgaggccagggctttggcgtcaatcaccggctgtggcgtgaagggcacaaccacctggcgcaccgtgccgctctgcaccttggcgctgatttcaggggaaaaggccatttgtttgagagcaaagtcgggattgccatcgttggcacgtcggagataaccggttacgtcgctcatagagggtttcccccggtggggtttcggtggtgcatgttggggccccggctcatcggctcatgaggttgaaggtgactttcttgatggcgtggccatgctcttcaacgagcttcgcgccgagcgtgtctatgaggttgagcgccgcctctcgggcttctgcgtagttcatggggccgccgctgttcacgttccatgtggattcaagggcgttgcctctgctgtccaccaccaggaacttgccggaccagcgcacgggttttcggggttgcttaccaaacaccgagctgcatcggccgttgaaattgactttcaccccgcaagctcccaccaggtggaaaataagacgaacagcttcgatttcatggggttatcccttgcataattggccgccctgagtagaatccgggcgacttatctctggcgatttaagtgggaagaaaccgcgcagccccttgggcacgcggttttttttcgtccgcgattcggcttagatcccttgcggggcttcctcaccgcccagcgcctcaacgagcgccggcaggaactcaccgaacgtcagcatcatcaaggtaaagctggcgtcgagctggcccagcgcatcgtcgccaccatcctgttccgcttggtcttgcagcaagtcctcgaatttcaggcgtttgatagtcatcttgtcgtcgagcatgaatgacaacttgtcctgccaggccagggacatttgggtaacgactttgccagtggtcaggtgcagttggatttcttcaccggtcaggtcttggcgcttgcagcgcacaatgccgccgtcttcatgggtatcgcgcaactcgcactcgtcgagcacaaagaatccgtcagctggttttttcgtggttgcccagtcagtcatggtggccaccggagcgatttttgaggtcagcggtcgcaccggtagcgtgccaatcacttcacgcagggtagagagcaagtcctcggcacgctttgggcttgccgaattgaccaggatcaggccttgtttcggcgcgatggcggcgaaggtcgaagagcggcggatgaatgctcgcggcaggaaggcctggatgatttcatccttgatctggtcgcgctcctttttgtagaccttgcgcatttgctcggtctcaatttcttcgaccttctctttcaccgcgtcacgcaccacgctacccggcaggatgcgttcttccttgcgcgcggcgatcagcaggaagtcaccgctgacgtgaaccaggggagcgtcttcacctttaccaacaggggcgacgaaaccgtaagtggtcaactcctggcttgcacaagggcgcgccagcttggtggccatggccgtttccagcgcctcagcgccaacaggcaagtcttgggtcaggcgatagatgagcaaattcttgaaaaacatggtgtgtccttagaagggtagggcagtgccgggcctggcggcccgagaggtcaggcgccttgcaggtacggagctggcgcaaaggggatgtcgtcgtccatcgggtttgcatctcggccgggcacaccctgctgaccacgcgcgctctgttgaggccggtgttggcccgccgtgcgtgggtccgccgcccgttgctgtggttgttgctgatcaccctgggggcgcccgcccagcagctgcatggtgccttgcatatccacgacgatttctgtggtgtatcgcttgatgccgtctttctcccactcgcgggtttgcagcttgccctcgatatagacctgggagcctttgcgcaggtattcgccggcaatttctgcaaccttcccgaacatagacacgcggtgccattcggttttctcgaccttctggccggtttgtttgtccgtccactgctcgctggtggccagactgaggttggttactgcgttgccattgggcaaatagcgggtttctggatcttggccacatgtgccgaccaagatcactttattgactccacgagccatgtctggcctctccttaactatccctatacatcatttgggcgcaaaacccgtgttcggcacatacgataaagcgttccgataatttaaaacagcgcttttatgtctgcatggtttagtatctgttcaatatcgactgaactggggctgtacggacaatgaatctggaagtgtttgagggggcgacgacggtggaagaggccgtcgaagccagttacatggagcgccggcgccggttttacctgtacgtcgacctaaaggccgacggcgttcgccttgacctatttcggcatctgccggaaaaggagcttcataccctgtcaaaccaggtgagtgtggcctgtaaggcgcgaaccgggatcaccgaaaagctcgccaggcgcctggaatacgtgattgggattcccttcgggtatttcgaccagcctctaccggagcgtgagctgcgcgcatcaatggcccgcggtgcacgcctggtgcgcaagcttcaaaaatacgacttagatcctgagtggtccgggcgtagcaaaaacaaaattgcccaggttatggattctccaagcggtcagcgtggagtatcgaaggccctgtatttgcaggtgattgcggcgttacgtccgaagaaaaacggttaggaagggaatgtatagggatcgcggaatgttagacgaccgcgtttcagctatggtatacagcacgccgatttgaggcagattgcctgcatgcacaaataggagacgaaaaaaaagaacccgcccccgccaaggttataggttcttttcgacgtaccaaatgataaagcaccacaaccatcaacccttaagctttccttgcttgccttgtgctatccgaagatggcgccgagggggtatgtcttgttggtagcccgagtatatcacagcctcgggatatacaaactttcccgcctttttcaagaatccagactcagtgtttcgctgaaccggccgccaggctgtgactgtcagcacctgttttggttcctgttttttgccgtcagcatccgactttcagggggtgctcgatgagcatcattcgcgccgcacgaaaagcccagttctacaacctgcccaccaccatcgtcgatgacgacaggctttcttgggaggcccgtggtctgctggtttacttgctgagtaagccggacaaatggacggtacaggtccgcgatctgatcaaccgcaccaagaatgccataggcaagtcggctggcaaggacaaggtttacagcatcatcaatgagctgcgcgccgcgggttacatctaccgtgaattcaagcgtgaaggcggtagctttgtgggcgttgactacgaagtgtcggaaacccctgatttagacgcggccgccgagtacttgcggtccctagagtcaaagtccaacacaccgtttccggattcggcggaaacggtaggacaggcaccaccatttccggatttcacggaaacggcggcaccggttacggcaaagcccgaaacattagatagtactgaaagtacatctagcattgaaaaagcagtaaaacctatcgcctccccccagggcgcagaagctggggcgcaatcgccggccgattcgaccgttccgcccgactaccccaacgattacccagggacaggcagcacaatttttgctgcctggcgcgcctatgctctcgccttccattcccgttacaagcaatggcctttctacaactccaccgtaggcggaatgatgggcaaggctgtcgcccgtatccatgacgccaccccggccgctgtaactcactacgtcaagaacgagagcggcgcccacctcacggacaagctgcaccctgtccctgtgtttttgaagaactgcgaaagctacgccagcaaggctgtgctggctgaacaaagcaaaaagcgggcggacaaggcagcggcggccgtgagagaagcggaacagtcccccgccatagcgccccaggcaaacgaacccagcaaaaacacaccgtcgccagcatctgccggcgccgcggccctgagcgagcttaaacaccgcgtgggcataccgagcaagtgaagcacctgtaattccaagtactcaatcgccagagagaaaacatcatgcgccattcaggcaaaaacccaaccaaggcccaagaccagtggttcaacgacgtagccgatatctgcgggtgcatctgttgcatgttggacggtcacccgcgggatttttcagagcaggcccacgtttcgatccatcactgcgacggccgtaccaaggcacatgcgcattactacgtgctgccactgtgcgctggccaccaccagcaaggctacggccctcgcccggatatgttggccgtccatggcaacaaggcccgattcattcaggaatatgcgcgggaaatcgagctggtagaaatgtgcgtccagatggttgagacatccggccgcgttgtgccgcctggtgtctatgcgctgctgggcaagtggcgggaaagcaaacaatacagcgaggaagcggcttgatgagtgccgaagaagaaacccccaaggtgagtaccaaggcttgcgcctgtggcagcaccaaccttatcacgctggaatcactcaatagcaagcactgcgcagagtgtggcgcggatattgattggccactggagaaaggccagaaaagtctcaatggctgccatcgttccggccgcaaccccgcgccgacacaggctttgggggctccacgcgaataacttttgacctcatgttgtacggggatacgaaactatccccgtactcaaatcataagttttattcaaaaaacgctttataaaattcagggctgagtgatacgctttgttctctacaaaacgccagagataaagctatgccaacccttccaatcatgtttagccggatgtcggcggaccttttagcgcatcgcatgcgtttcttgggctgtccggaaattctgaccggcttgtacgagataaatcccccgccaggtttcgacgttgagcactgggccgatactgcccgcggcctgaccgaggatcttcgcgacggtcgggcgatcaaccctgatcccgcgtctatcgcccttctggtcgaagcactggagggcaatagcgttataggttcggccccaatcgaaaggcgcgcggggctaatttcagttgcggcaatgattgcccagcgcttggagccctacgcggggcgcccaattaaaccggaggttcactgaatgaccgtagtagccaaaatcaaagcatcttccgcgaagcctgattgggttggcgcgatgttgggtaacccccgttttgagttcactgcgcgtttgtgcaccgacagtgacaagctgcgactgatcgccaagcacctgccgacctgcaccacggttgagcttgatgtgtgtggccatggcaacgctgatatgggcgtttcccgcgtcgagctttgtgaaaagctcgttgccgaaatgcttgaaacgggcatggtcgagtacggttcaagcaaatttgcccggctgttgcgctgtgagtacgccaatcgcttgattgaggtcatttccagttacgggcggtgctacttctactcccgcaagcgtgacagcgtggcccgcctgagctttgaccagcgtgtttacctccacgatgagagcggcgcgacgattgaggccaaagccaccagtaagtgggaagggttcagccacaacgggactttgcgtgacttggtgctgcaaatgcgcaattacgtcatgcgcggcgagcgaatcgaccccgcatacattgggatcgacagcccacggggccaaggcaacatttgggggtattcgccggagcaaatgcgtctgtgccggcaggccgcccagcagctgcccatcatcaacgtagcatcgcccatggagtgcgcggcatgagcctgtatccggggcccattgtcttggggcatatccgtgtgaaatcgatctgtgatgagtgcggccgcgcccgcagcagcggcaaccatcagaagtgcagcaagaaacgccaagtacgcactgcttcgctggcgcccaagcaatgagcgcctttgaccaggatcaaatcgaagcggccgagcttcaaagctggcttgtaggcaacgcccgctccatccgccctgtcgcccgagttgggcttatggggtgggcgttggcagcgctcaaggcaaacccggctgtgggcgagttgcaccttctggaagaggtgtgtgctttctacgctaacgacgaagacacgttcaatcgcgaaggcggtgagccattcagctcaatccctgtcgaggtaggcatgaaggcccgacaggctcgcgagcggtttattgagcgtgaggcccgtaccgaggccaccaacaccagcggccaggctcattgcccgcactgcgccgtttgtcatacgagcgaggaaacgtgcgctaaggcgttagagcgctttaacgcatcagcgtttaatggcttcccgtcggccacaatttcccaggaaagcatccatgaataatcaaatgatcggcggcctgtcccgggacacgctgacaaccgccctgcgcgcgatgacagacgcccgcgaaacgttggccaacggagccgcccgagagcgctaccggtcggctattgctgacattgaggggcttttgaaaagtcctgatgatgctgcccctgtttgggcagaggtgctgttaccgctggaggtcgtgcgcgaagcgctcaccagcaacgacagtgctgagcggctggcgaatatggatgccagcaaaaccatgcgtcaagcaatcgacggcctgaaagcaatacgcgacagccttcaccagggcgctcccgcgaaactctattttccgacgatgctccgcaaaatgtggtcaggcggcgatgttcagcgttggatcgaagagcagggaccgctctaccgcaagccgctggtgactgagggcgctacagccacccttcaaggcgtttatgagctgctaggcattggtgagttcgcgcgaacccctggcaccctcatggcgaatctggaaaacatgcagcgctttgcaggctacctttcggccatagagcgtgagtttttcatggtgccaggcgagcccggtgacgagccaggagacgaaggcctggagccagccgacacgtgcctgctgaactgttggggcgctgattccgcgcagcactacgtcgagcagttccgcactgcgctgctgttgatttccaaaccagcgggtgaacctgcggcctatatccagttcggcgaggctgattcgggcgaaataggcaattacgagattgagccaaaccgtaaggtctgtgaggccttgaacatcgctgataacggcaatggcacgacctacgacttgtacatgttcccgacccaggaggccggcaaacaatgaaagcgctttcaattcgccagccgtgggcatggctgatcatccatggcggtaaggacatcgaaaatcgcagttggcataccaaattccgcggccgcttcctggtgcacgcatccaaggggatgacgcgggacgagtatgccgagggctacagcttcgctctggagtgtggcgttactgacctgccgcgctttgacgaattgcagcggggcggcgttattggctccgtagagctggtggatagtgtcgacgccagcccttcgccttggtacatggggcagaaagcctttgtgttgcgcaaccctcaacatcttccgttcacgccattgcggggccagctgtcgttcttcgacgtagcagacgaccgcctgacattggccaaggcagtatcaagccaatgacagatatcgaccctgttgagcttgagcgcgctattcgcaagatcaagcattgcctggcgctctcagcgagcgccaacgagcacgaggccgccgcggcgatgcgccaggcgcaaaagctcatggcaaagtaccgcctgacagagacacaggtaaatttgagtgacgtgggcatggccagcggcgaaggcgcaaaagccaagcgcgatgcctgggagtcatatttggccgctgtggttggcgaggtattcgattgcgaggcgctgactcatgtggcgtggtgcaacaaggctctatgccggctggagcgctccgtattcgtcggggtagctcctgcgccggaaatcgctaaatacgcctatgacacgctccacaggcagtgcatgagcgcccgaaaggattacgtgggcaaaatcaatcggggcgaggtgcccaaaaccggcgcaacccccaaaacccgcggcaatcacttcgccctgtattgggttggccaggtgaaagccaaaatagaggcgctggtgccagttggtgatgacttgcaggattgcagcgaaagcgaatcgcgcgctttggtagcgatcaagggcaaaaatcaggaactgatagatgcctacttggacggcctcacaaaaggcaagggcccggcacctggaccaaaccggcgcaagatcaaggccagcaaggtcgatgctatgtcgggtatcgtggccggccgcaatgctcgcgtaagtcacggtgttggcacaacaggtgagcagctggccgccattgggcaggccccaatgggcacccaagggagttttctgtgagcgagttcgtactgcaagactcccggagtaacacgggcgatcgcctgatgttttgggcgcaaaacggttcgggctatacgacgaatctggatcaggcccagcgctacacccgcgaccaggccgccaggcagaacgaatgccgggaaactgatctgccttggcccgtcgactatctgctggcgcgccacacggcagccgtggactgtcagaacgtcaagcctgacgaaatcgaagtggcgttgccggccgccgaccaaacctacctgtatgtcgctggcgcctggaatggtaatgatctgatttggctgacgccggatggccgtcatagcgacaacctcggcgatgccaaggtgtacgacgctagtgttggggtgtcagtcggcacatacagccgccagggcgtgagagccatccccaaggcaattgcagaccagctggcgcgcaaagtggtggccagcaccaaggtgaagcacaaagaagccttgcgcggcacaggcattatcctggccaagcctcgaaagttcatgttctcgcgcgaccggtgcgaccactgcggggtgtttatctccgacgcccaacgcttccaggactgcccgaagtgtggtggcagcaacgccccctgagggcacaagccatagctgtatcccgaacggcagagcgccaaaacgctttgccgtttttgtttgaggcgccggcgctgcacggacgctaacacgcttagcggtaacgcgttaaaacgtcataacgttaatgacacattagcgtttttatgtaattatgcggttgcagttaagccagagataaggaacccctatgaactattaccagaagccgccggccggccaggagagcgaaattggctgattacctgctgattacccgccaactgctggacggtctttgtgccgacctggagcaggccgccccgggcatgcccagcttgaagtcagacgctggtgcgcgccgaaacgtgctgcgccttatcctggccggcgaacagtccgagcatgcacgccctattcccaccaccagtgaagagctggcaaagcaggcgcaggaaacgaaagaacgcctgcgtacggctgagcgcttattgcgtcgttgccagccgctggtggttgagggtggcgggaaatatgttgtcgtcgggtctgtgactgacgccattgagcgtttcctcaaaggtgcaccggtggagagcagcgtatgagcgaccaaaccggcccagtccgctatgacctaatgttcagcatgtccgaagccagtcatgcacgcgtcaaccagctgctacaccagtgtggccacaataacgtcaacctattgcttgctcgtgggttggcgttggttcaatgggttgaggaacaacaagacctcggccgcaccatcggcgccgtgctgtatgacggtgaggctgtcgatgtgtcggaattgacggagcggcctgagcttttgaagccgcagccccgccctcagtctatccctgtcaaacccgtggcggctgttgccgaggtccagccttcaacgccgccggcgccgttggccagtgatgatgcccccgtgaatccaaagctggtgccgcgcgcgaagaatcccccgccggttaagcagcctcgggcccgcgctccgaatggccgcgaacaacagctgcgcgcccacatcccgaacaacgatggtccggtgaagacctacacctgggtgcgctggaagtgtgaaatggagaagcgaaagccgccgatcctgattggcgatgaccgtgcgctaccgggggaactgagtcaggaccacctgccagagttggagcgcatgctggttgatgccaagcacgccacgcacttcctggtgacagttgacggttttctagcctactacggctaccagcctggcaatggctcgcggggcggctggcgctacgtcgaagagggttctatgcaactgcgcaaagatgcgcactgcgatgccggtctcttcgcgattttcccggtagtaatggctgtggactacctacgccgccaggccgcacctgcccgaacgttggccagcgtatgagtgcggtgaaagcgtttccatgggcaatcaatggtttgaactttcgcacgcgggccgagctggagagagtcgtcgaggcttttgccggagccggtacccgcgagcatctatcggcggcgaaagagctgatgcgcgcagcgatcaaccaaaacaagttgagtgctgaccagcacgccgaaataaaagagaggctgaacctatgagcaatgtgaagcgttacagcgtcgagcgacctggtatgcagttgcacctgccaggccaccggctggggaccgaagagtgccttgttgtgctcgctgcggacttggacgcatcactggcagccgccaacaaggcggggctggctcgtgaagcggcgctgcgccagcagttggacgacgccaccaaatcgctggagaccatcactcagcttgcggggcgcgacgaacacatgaagcacctgagccaggtgcgtgggtacgcgaatagccgcgccatggttgcccgaaatttccttatcacgtcagcggagggtgtgcctcatgaataacgaacgtattcggttcctggtagagctgcttggcgcggtagcccacacggcgtttcgcgcagctgatgacagcgaggaacgtgatgaggaaggcagtcgcatccatgtggtgggttctggcgacttcgatgccttgtcgaaagcgctggacgcttgcgatgagctgccggaattgggtgatgcgtacgttcgtgacggctggcttcgggcgctggacgagctgcgcgggctgctggcggctcctatgacgccttggacggccctggttgatggtaggcatgagaatggcattcggtacatcggcgccagcgactcccatgtgctgggtgatgtgtaccacgggtatggccagctggttgtggggcgcatgggcgaagaagggtatgcagaccgccagggagtcctctgctggcgctacagcaagtccggcgaacaggtggaacctcacttgccagtgactcactggcagcccttgccggcgccgccagtggcccgtccgagtatcaccccgattaaattcagtgattcccctgacggggcggcggccgaggccgtttatctgcgccaggtcgcagcggaggatagattcaatgggaactgatcaaacaactggcgccgtggtggtcgatatcgaagatggatttcccaaggctctaatcgaggaagtcctggcgggcatgggcaccacagagggccgtcgggcactgaggccaaagctgcgcgccctgctggatgcgcctgcatgtaaggcctgcaacgacaccggcaaaatgcacgaatctgggcaagagcctggcgagtgcgcggcatgcttcaaggagtcagccgcccagccccaggtcgagccagtaattgccggtagcgttcttgatagctacgactatgcgattgcagacctcgatcctgaaagcgcttgcacctacctgtcgaatggtgagttggcgcagctggtcgcagcagtcagaacgttacaggttagatacttgacgcaacccgagccagatgcggcgctgtgtggattctacgaagtgacgggctaccctggccttgtgcgtgagctggttggccatgtggcgcagctacaggattcagccaagcgcaacgttaaaccctgggaggacacttttccgccgacacttctgcctgctcacgtcgagcgtgttaacgccgcgaatgcggctctacatccgcccgccccggtaccgggtggttggaagctggtaccaatcaatcccaccgcagaaatgctcaaggccgttgatgatgaggcatccgacaagcacctggcccgcggccgcgcagtctgtgcgtgggggttgatgctcagcgccgcgcctttgccttccatcatggacctgcactatggcgtggcccatgcggttgagtgccaactacctgcgcggagccagcccggttaccagggtgtcggcggtgtgcattttcctgcgccggctgttgtagagccaatcctcgtggaagctgtggcagttacccgcgagtgcgatgaggaaggcctacgactggattggttgattgagggtggtatcgctgccctggagcatcctggcaccgtgctactggtggcccagggcgcactgaccaacgacagcggcaacggctatgtctacccagcacggaatccagaagatgacgaataaagcacaattgggcggtatcaagatccttcaaaacgatatgctcccgtctatgacaatgatggtcagccccgacctgttcaccaagctgaccgatacgccagagcaggccgaggccaagcaccaggcaatcctggccaatttcgcgctgttcgatcagctttttaagcgccacatttcaaagccgcagtgccagcagccacaggcgcaccctgcacgctgcggctgtgaggttcgatcatgaccggtgcaacgcgtgtcgagttcacgataaagcagggtgacgaggttgtgactgcaaccctagagattactgaggggttcagccttaccgaggtggtggacgcagctctcgccggcattttcccaatgacgacgactgcgacccaaggacggtggccaccgctgcctactggcgcccttacgaagctggcgcttgttcctgaccaggttgtcggccgtatatacgatcagcctggccaaccattgcgcgccgttctgaactcaaccgggcgcgcgctgccagatgacactcggctgtacgcccgccccgctgatacgcttctgcgctatgtccgagcgccatcccggaaagatcccaaataccacgaggaatggcccgagattgaaggcgggccggtgttcgatggcgtcacgtactgcaacgatcttttcgaggcgctaaagcgctataacgttatagtggcagaaacgctgccagagggcgcactcgatgagtaaggcgaaagaggcaaagttgcaggctgtcctggacaaaatcgtggcggacacggccgtggccaagaagctcgccaaagagctttatggcgaagacgcgcacctgtttgaagagtccggcgggctgttcgtgatggatggcgactcagacggctcgccgcgctcccgtcagaagcacatccggctcaccgcccatggatattgcaatattcatgggggggcttggtgatggctgaccagcaactgagtgagtctgtgcccgccgaagaagtgccgcattgctacctggtaattgcggtggtcgattacgaaggcttcaccatcctcaaggggttcgatagcgcgccggccgccgaggctttccgggcggcggctgagacgtatcaccgtacggcccctgaatggcctgctgagggttcgccggatgaagaatacgagcgctttcacgctggccatgcagattggctccgtgctcatccaggtggtgtgctcgcgggcggcgctcatagcttcggtatcatttcagtcccatacgtggcatcgctctcccagcccgctgtggctgacatctcggccgtgctggcggaccaggcccgcttggtgcgtgagctggacgttctgttgaatggtgaggatcgcgccgccaagcaggcaagcctctgcgatatcgttgctcagttgcgcacgatgatgaaccggaaagccggtagcgggactccgcaaggtatagaccaaatccgtgcacagtatggccatttagtcggggggcacgacgaatgagaatcgttgaccgcaagacattcctggccatgcccgtagggacagtattcgccaagtatgacccgtgcataattcgcgagccgatggtgaaatgtgactcaaccccgaatgcaggggagctggtcgacttctactatgcaagcctgactgatgaggttgattgcagcggctcatgtgagcgagacggcatcatggatttggcagtgatagagggcgcccctttcgccttacatttcaacacgcaatgccgtgatggcatgcgtgacgctgatcagttgttcgcagtgtgggagcgggacgatgttgttggtttgattgccaggctccaggtggcgcttgctgacggttaccaaacctcgaccttgctacctagcgaggaagcccagtgagtgaagaagtagagccggttcctatcgtagtgaacattaaggcgccaggtgatctatctgtcggcgattacgtgtttgccagccggtggtctgactgtacccccggcgacccgtggcatgtaggacacgtctcggaggtgggggagggctatgtggtggtgggcgaagtgtcccagcgaaagtggggcaatgccatgcgcgtaacccatgagcagggggcccgtattattgctgagtaccctgccatggaggatggcccggccctgccatacaagggtattgcccgcgtattcggtgtgcaggtgcctgacggatatggcaccaagaagttatagcgctaaagcactaaggcgccttagcgttgatttgtatagcccgcattgccctcaggtgcaattgcgggttttttgttatccggcccggcgtgagcctggaggcgtctttcatagtatcttgcggccatggatggaaaccaaaccacaagggaaagcctcaagatgtcgaaaaagatcactgcattggcgctcgctacgggcctgtgcctggctactggcaccaccactgcatccgccggcgtgaacctgttcaaggactacgtgcaaggcaccaccattgcgaaatacacccgttcggcggggtattacgactgttcgaacaacgtgcaaaaggcccggtgcactgacggcttcgatttcgttggcgagaagttcaccgtcgcgttgttcttccgcgaggacaagctggacgtggtggcgctgatcgcgccgtataagcaggatctgtacccgaaggtgtccgctgcccttgccaagaccttcaatatcatttctatggaaaacgagaaatcgtttatcgacatggtgacgctgcgcaacactgccacccaagatgagtacgtgcaaaagttcgtggcctttgaagatgccgctttgtctgcgggcgacctgacctatacctacctggaagtcccggaaacggttggctatgccgatgtgggcgcaatcctagccgctgcgccggaagatgtgcgccgggcagctgtccgtctcgtgagcaataatcaggcttcaagcgtggtggtgcgttttgagctgcccaacgtaagctacaaacacgcgtcgaccgagcaattttgaaaggagccagtgcgctatgagtgccaatgagcgtattgccgccagcgaacagctggagggtgtgggcttgccgccgcgtgtgcgtgcgcatgccgaaaaacatctgtcccggatcaagatagccggcgacgtgcaggcagtgcgcttggctcaggcgcgtgctgagggatatgtggagggattggacatcgctggcgcactcaatcctggcaccgtggaagcgctgtatatcgccatggacaacgagggcgcggcccggctgatagagcttgagcagtaacgggtttacgccccttgctcattggcagctttgtcgacggcctcggcgaggatctgcgctgtcgtgctgagctcgctgtaaatcttgtttaattcaagttccggcgcgctggccggtgtgcgccggtactgcgcgtgcagccgccggaaattacgcagagtgtcggacaagtgcggagtcagttctagggtgatattcatcgataggcgcctgtagttgcttgagccgttatcctgccacgtcacaagcccctgaatcacaaaaggggcttttttatgctcgaaaaccaaataaaaacataaaaatgatgtattgatatttttgcccggtgtatagtggcgacaagccagaaatagccagttgggtgcatgggcatgtcggacacagataacgtggtagagataggcgaactgcggcttgcacgcgtaaaggctgactacacacgtcggcacgaaggctgccagcaccgtcttttagaaatggacgatgtgggcgaagttgtcacttgcagggactgtaaagttcaagtatccgcgtactgggcgctcagcattttgcgagagcattggcgcgagcacgcgctcaaggttggccggactctggcggccgctcaggaagagcgaggcgcggtgctgcatctgactgccgcgaagaaggtagagaaggcgtggcgcaacaaaaccatggtgccgggctgtccgcattgtgaccgagggatctttccagaggacggcctgggcggctctatggtcatgcgccggtttgagattggcctgcgtgagcgcgagcgcgccgacagcatcgcccaaggcctgccggcggtggccaagctgttgccccgcaagcccgccacgcgcaaggcggctgctccaaaggctcgatccaaggtcaagccccgcccgcagtgggtaaatgccccggcgtgggccgaatggcttaccagcgatgctaaaggtcgctggacctggcaccagatagagccattcgaagtttcgaacgaatatcacagcggctccatgtgcgagtttgccggcaccacgctggcgcccgtggatggggctgtaatcaaagaaaagcgcccacggggcgaacagggagtgccgcaatgaacgatgagctgcgcgacaagatggtggccaacgctgccgagtggcttaaaaaccatacttaccgtgaactgaccaatgcgaacggcgtagaggtgtggcgctgccagcagccaggaagcaacaacctggcgtttgatatttgcgtaacccgctacggaatggcgatcttcggcgatatcgggcacctgacgttcgacgtgggggccgactacgggatcaacttcctgcgtaacaaatccttgggctacctgcatgggaaactggcggcttcctgcaaagcagtagagctggataaagacagcatccttgaaagcgtccgcgaagcgattcttgagcttatcgacgaaaacgtcccggtcgagctgaaacccgattggctcgacgccggtggcgatctggaccagctaaagctatggcttggtgaaatatccagagcgggcgacgacgaaacgcttgagtacgaggaattgctcgactgcatcactcatattgagcgttttgacgacggcgaacgcgacattgtgccggccttcgacttcctggtcgaaagcgaaaagctgctgggcgtgagcgatacgtgggagtggggcattacaaagaccactgaggcggtttggcggaaaatcttctacgtgcagcatgctgccgacgccatcatggctcagaagggcgcggccgaagagctggcggtggcctcatgaccttgcgagagcagttcgaagcaaaacacccggtaccggccggtgttcagttcgacgagcacctaaaggtctactacgtcgagccaggcccgcacaacgtcgccaagcagctgcattgcctttgctggaacatgtgggttgagtcccgcgccgaaatgcttgtgcagcttcctgatgcccattcctacacggtgccagacgttgctggtgctgcaatcctcgattgtatggccgccatccgtggcgccggcgtaaaggtgaaatcatgatcccagggcagcctatcgaaaaaatcgaaaaagaagccgacctttgcgcgctgttcattcaggaatttaacaagctgcctgactggacctgctacccggaagcggcgggcttcgacatcctggtggtgcacactgacggccgccagatcggcgtagaggcaaagctttctctcaacgcgaaggttgcagaccagatcctgcctggacggggcgcggatttgaatgagctgcctgggcctgactatcgcatggtcattgtcagcaagatcactgacgccagcgccggcatagtgaagatgcttgagcggctgggtgtcaccgtgatgctgcctcgatccagctggacgcgtgaaggcaataaatacacctttgaccttgcccacaagttgctggaggtgagcggtagcaagccgttttacgacttgtacatgtacgactggaacccagcggagcggtgccaagtacccatcatggtgacaaacctccctgctggcgtgccggcgccggtgaggctgacaccctggaaagagtcggccctgaaagttatggctttgctgcgcagccaggggttcatcacggccaaacaaatcgccgggcatggtataggcgtgacggcctggacccagccgggcggtagcaaacctgcatggctcgcaaagggcgatgctcgtggcacctggatcgagacagagcacttgccagccttcgataagcagcatcccgaggtctatgccttggttgttgatgcgcttacagcgactcagcctgtattggagctgacagcatgatcatccccgcagctgcaatcctgttcatgctgtggaacatccataaggggccgcgggcatgaggactgttcgcaggatcgtcgatgacccagcagcccaatacggtttccgctcggtaccagccacctacgaggacgccgagaagatcaccggctttcgtcttgaccgccgggttaactactcgatcaatcaggacggtgaggtagagcaggagagctggtgcaccctggactgctctgggtgcgggtgtggctgtgagggcggttgcgggtgcgggccatctaccgggtgccgtgaatgtggttacaccggcaaaagccggcactacttcggtttcccgccttccccgccagaccgaaagaacccttaacccaacctccacaacatcctgccggcgaccggcgggcgaggtagtgctatgcccgcgaattgtgaatacagcatgaatcccagtgatgccatggacatatcaggcattgctcaactcgacctggccatgcgccgccaggctctcaccgggtacctggagcggaacggccagcagcgtctggtggagctgatggcgcagttcattggcatggccaactccgtagcggaaaactgcgccgaaatgagcgaccaagtgctgatcatggagtgcggcgtgcaccccgataggttcgatagcgtgaacctgccgaccatcattggcgcctgccagggagtgttgatcgcgagcaagtgcgacccggccggcgcctgccacggctgcgcctacaggcttggatcaattgccaatcagtcacctatcaccacctgtgacgccgagcacatggcccacgaccgaaaaggctttctgtgccatgcctacctggatgaggcagacgaacccaccaaggtgtgtgtcggccacgccaaagcgaccaagcaacaaccctaaaccctgaaccaacccaaggaaaacgatatgccaacccacaataagcccacgaaagccccggaatacgcgtatgcgctggcaaacgactcggaagactggggcgcagacgacctggccccattcgtttctgacaatgaactggccgctggcgcgatcatcgcgcgtggcgtggtggtccgtcctgatgcgagcgacttcctgccgggcgccgacgatatcgtcaaccacatggccaacagcgccaacgatgagcacagcgagttctgcgacggattcccggacttgagtgatgcagctgaggcagagctggaggtcgcgctggaggcgctgaaggcgtgggccgaaaagcattgcgctgtgaccttctaccaagttgtgcagatcgagagctacacggtgacggcagaagacaaggccgccgctgatcagtacttaagccagcagcaaagccagacggcgtaggcagcgatctaagcaaagggcgccagggcggtgcccttttttgttgggaaaatggccgcatgacgaaacgatggataagcgaagagtatttgaagagcctcccgccggcgatgacgcgccgggcgctctcttccgccccttcggcgccggcagtagcaagcccggccaagaaggcctcacgccgcggtgccgataaggccgcaccagttgaggcgccgccggtggtgagcgatgtgccggccaaaacctcaacgcagcgtatgcaggcgctggggcggcttcctgctggcgtgatgaataagaccgaagaggcttatgcggcgcacctggagcagttgaagcatgaagggaaggtgctgtggttcaaattcgaagggatcaagctcaggctggcggataagacgttctacaccgtcgatttctttgtcatgcccctgagcagggagctggaggcgcatgaggtgaaaggtttctggaccgatgacgcccgggtgaaaatcaaggtggcggccggcatgtacccagtattcaagttcatggccatcaagaaggagtcaaaggcggagggcggcggttgggccgtcgaagacttttgagtggcgagctgcctggagacgtgacggccgcccatgaaacttacattagccatatcatgttttgtgcagtctgctacgcgccgaagaatagccattgtcttacaggtcgcggcttgagaattgagtacgacgcactttatttgatgtcgattgtcgatacgcgcgtccggcgtgaatggctctacagagaggccgagcggaatcccgcaaacgcagacgggctaaaggctcgcgtgattgagctgtacaacgacgagcaggaaaaagcgcagtaagttgtccgtaatgccacttgaatagccaacttctagcgcctttctggcttgccaaatgtatagggatactttctaattctcgccgttgagacgtaccggggagggtgctttagatggtcggggacaaacaaatcgcagcggctaacacagagcaaggcaccacgcctggcgattgcgaccccacgtcgctctcactgttttgcgactcggaagacttgggcgtaggcgcggggctcaaagagcggcgcagggctgaggaagtccgcttggcgggcattattggcagcaagttgcgccgggcccgcaagtcggccgggttcaacgaaagcgcggccgcaatcgccctctcgcaggagggcatgacgatggtgagcttgtacgagaatggccatcgtccacccagcctgatcaacctgaggttgctggcacaattgtacggcgtgaccactgattacttgctggacatgcacgacgacatcctggccatgccggaagagggcaatcaggcggtgctgaggggcattatcagcacctccctcaatctgcacttccaccagttcaccgactctctggctcgccgcaacgccatcatgatcgaggcgctgagccttgatcgcgctcttttgtccgatttggccgtactggccacggatttggtcagcgctttgagcgttttcaaaacccatgctccgaacttcgacgacattcgcggaggtgcaaagcttgaccgtttggtcagctcattgcgtgaaagcatggagcaacagattcgccggcgtcagcgggaggaacaaatggccgattacgagccgaccaacccggcgctggaacagatcgccagtcatgtgcagcagcttttgttttagttggacgtttcacgcgctggagaggtggacgcgtatagccctgcgtggcggccactggcttcaccagcttgttaacgggggcagtgacaccccccaccggcctagcttcggggttggtgggggtttttaagggttacgcataccggagcgctttgggatagagcgctgcggtatgcagtaggccgaaaggcggcaagtccggcggggtggagggaaccgccagcgtgagtggcgccagcggtacgggttgaccggacgcttaagcgtaccgcctgctgcatttcaaatttgcttcggcagatagcttggcctcctttaagggcatgtgatgcggtcgctcgttgatggtggtcaggtgtgctgttcgcatcgggcatatgacgtttcttagacagggcgtttaaacaccacagcatggataaccgacaggagaggggctttaccgcctttgcggcgccggtcagtagcgttccgttggctgatagcggtgggggtcttaccaggatcaacgcccaaagaatggcccgccctgcgggccatttttttaaagtgaggcgcaagaagttggccgtattgccacggcctgtagcgaacatattacgcatgaggtccatggatgccgcgcaagcctgaaactgaaaagcctatcccggcgggggatgatcaatccccgtccaaggcggctacgcgccctcgtaaacctgcaaaaccgcgttcggttaatgttaacaaggacgcgcagggcaaaaagcccgccaaaacggtaccgaaaaagactgtggggacgactgcaaagccacgggcaaaagcgccggcatcgaagcctcaaaacaagaagccagcgcgcggtaccactgtaataaagaacccggtaaagctttcgctgaaagagcgtagagctatggaaatggcggctttccaaggtttggatgcccgccaggcgaagttcgtcgacttgtggctggttacctacgacgcccggcagtcctacaaggatgcgggctttgcatgcaagaacgataacgccgcgtcagcaggtgccagccgactgttaagtaaggttaagcaccacccatatacgcaggcgcgccaagtcgagctctttgcacgcaccgccgacgttcaaaatcagcttattgccacctaccacgcggcttcctttgcagacccccgcgaactggtcgagtacgtgcgccagtgctgccgtcactgctacgggattggcttcaagtggcaattccggcccagcgaaatggagcgccgccgtgaccagtacgcggcggccaaggcagaggccgagaaagccgacgaggaaatcggcgagtttgatgagctggggggcgttgggtatgacagccgcaagccgcccaactacgactgccccgaatgcgacggccatggtgaaggccgggcgctgttcaaggacaccagcaacctgtcccccgcggcactggcgctttatgagggggtgaaggagggcaaggacggcacagagctcaagatagccagccagaagggttaccgcgacaccctggcgaagctcttcaacatgaatgtggagccggcagtagctgtaaccgtggccgtgagcgatgaggtgctgaatgacctctatgcccaggcgcagaaaaacaccgaagccaatcgccaggcgatggccgcccgcaccgaagagctggccaagatagggatcgtctcttgaagccggccgggcctactgctgcccaggtcaagcaggcgcgcgcaaccgcaggcattagccagcgccgtagcgcggatttgatctatgtcagccgtagagcctggcaaacctacgaagacggcactgtggccatgaagctcggtctgtgggagctgtaccagttcaaaaccggacaactatgggttcgcccgctgcccttgaaacaagagcgacgggcgacattgcgccaaggcaggccagaaaacttaacgccaatcagggcgaagtcacaggagtagtaacagtgcagcaagcaacagcaaccattgttaacgacatcggcctcttgaaagccgaacacatcccccagttccggagctacctggagtcgaagggcgtgcaggtgcgtgattcaggcgctggccagttttgccacgtccgcatgccagaaaacccgcgctggatgccgattgagcgcggccgcggcggcgcacctgtgacgcctaccgcattgcgcagcctggtggatgggttcttgctcagtggcggcgtgaacgaaatcgcccaaaacttccatgtgttgccgttgggcgcggcgccggtggtgccgccggcggtgcaaatcagctcgcgccagggtgcgcagacatcgcccgcgccgctttcgcgttacctcagcgatctgcgcgacgacttggcgctgcacgcgccgctcctttgggatgacgaactgacccctctggaaaacgctgttcgccgctgggagtacgcggacgtgatgctggccgcgcgcacaacccaggacggggattaaccgggagagtacaaattcatgctttgccgttactgcggcgggggtagggtcgtctggcgccagcgtgcgagcggcccctacaccctttgccaggattgcaaacgcaaaaactgcgagcggggcaccggtgccctgcctcacgggatacacgaatgcgaacgcgcccaaattcaactgaaaatgctgtgagccacctatgagccagaaagaacaacgcaccaatgctggagacatccgccgcgccagccgcttggccaggctcacgcacgccaacgcggccctggtcgaaatatccaaggtcggcacccacacctggaagaacgaagccggtgaagtggctcgcctgcgcctcacagtggacggccgggtgcacttccgcgaccacaaccccaccacgcccaccatcgacctgcacagcaccgcgcagggcgctgccggcttctggcctggcttcccttatcgcggctctgaggcgctgctgctgagggggctgcgcgactacgtggccaagggaaccaaaattcacaagacgctgctggtgccgaaggtcaacggacgcctggcacgcggctataccccggcagacgtggcggtgatcgaggctcgcctacggttcagcccgatgtttgtcgagtcggcgccggcggtgcgctcgtaatgctgcgctacgtcgtgaatcgcgccaacggtgagcgcttgaccgtcgagctggagattggcccccagttgtgggtccgggatcagcagggcgccattgagcccgtcagccgtgaccacctgcccgccgagcgctgggcctttattgaatctggagcgtcaaatgtcgatctttcttaaccgttccgatttcgagtacgccgccagccaagcaggtatcaccaacctggagcgggctggtgatcgttacgccgacaccaataccgacatggcgtacaccgtgtggcttggcgtggccatgcccctgggccccgccacgccgcgcccactggcgtgggtgaacatacgcagcggcaagcctgtgggtatcgttctgcaacgccctacgggcccggagtcggatcagtgggccaagcgccgcgcgcaaggctggtcaccgtccatgcccatgtatgtcaatgccccggcggtaagccctgaggtgctggcggccgtgcttgagctccagcgccagcgacaagaagaggggtattcggcggaaagcgacgttgcgcagtaccagggcggtgagctggcgcgcgcggccgcgtgctatgccatgcaggcggggggcgtgtatccaatgcgctacaccagcttctggcccttcaagtcgaaaatcaaatcttgcccgccggcggaagcgctggtgaaagcgggtgcgctcatcttcgccgagattgaacgtatcgcagcccaggcccgcgccggcgaaggggtgaagtaatccatgagcaagccgaccctgtacgaagattcacgctggcctcagttcaaggaccaatacggcgccaacctgagcgcctttgcggaagatgtgtgcggcattgagctggaagtagggatgcccgtggttcacggccgtatgcgcaagcctggtacgtgcatggtgatttctgacgtgatcaatatgcatgacgcgcggctggcggctgtggcgctgtgggcgttgctattccacccccgcaacgacgtggtggtgatcgcgccgcgcgttgctatccacgggagccattgggccatctataaaaaggcaatttcgggctctcaccagtggctggccgagtatctgcggatcagccgggacggagtgcggacagatgccggctatggcggccctcgaatcactttcagaaccgcaatcaaccgctcgccggaaaacctagccggcatgtttggtagtcgactgctctttctgatcgagggcgccaagagcatcggtgacagctgcatgcaggcattgagcgccagccttgccactccactcaccagcgaagtgatcgcgcaacagagcttcatcgtggtgcaaacccaggcataagcgccagcaaatcaagcgatagggtgtaagggccggtaatacggccctttttgcgttaagggattgcatggccagggcttcgaaaaaagaaaaacagttggtgctcgatgccgatccgcgctggcccgcgttcgtctcaaggtatgcgtttgagcagtacaagttcgccgtagaggtatgcggtatgggcattgtgggcaagcccgtaacgcaccagcagaaagaactgttcgacgaggcgtccccctatggctgccgggtctcggtagcgtctggccacgggtgctttgcgttgggcacccagctcatgctcgccagcggtgagcccatcgcggtagagaatgttcgctcaggtcatcgcctcatgggggcagacggcgcccacgcgaccacggtgttggagcttaagcgcggccgccaggccatgtatcgtttcacctactcagacggtaccggccacacagtcaacgaggcgcacattctctgcctggtggcgatcgcgcctgatggtgatgtgccggcgggcgccgaggtcgaaacatcggttgaaagctggctggcgtggggtgctgacaaacaggcgagatacgccgcctaccggagtgacgccaagtcgttccggcgcccactgcgcaatttgcctgtgtcggcatttgccatggggcagcacctggcgcgctctggtgagacgatcccggccgaatacctctacagcagccaggaccagcgccgggcgttgttggacggcctggtggggcgggatggttgccagtttatcggcgccaccgatgagcacgcccaccaagtggcttggctggcacgctccatcggctaccacaccaccctggcccgccttgagtcggggcgctggcttaccaagatccagcgccagcccggcgccctgcacttcgctatcgtcgactgtgaggccttgggggagggcgattactacgggttcaccctggacggcgacaaccgcctgctggggcatgacttcaccgtgctgcacaacaccggcaagacgcgcagcttcggcgttatcgctctgtggcacctgctgtgttaccgcaactcaaacacctacatcaccgcaccgaagctcaagacggtgcgagagggcgtgtggaaggaaatcaccacgctcaaggcgcagattgagaaggggccccacgcctggattgcgcaatacatcaccattcaggccgagaaggtctacatcaacaccaagtcggccatttggtacatcaccacgcgtacagcgccccggggcgcgcctgagaacctggccggtactcacggtgattatctgctctggatggcggacgaagcctcaggcataccggacgaaaactttggcgtgatcgggggcgcgctcacagaccctcgtaaccgtttcatcatggcttcgcaacctacgcgcagcagtgggttcttccgtgactcacaccacagcaagagcaagcgccagggcggtgcctggaccagtctcacgttcagttccgaagaaagcaccctggtgggtattgagttcatcaaggaaaagctcatccagtacggtgggcgcgatgaaatggaataccagatcaaggtccggggcatgttcccgaccaactccagcaagtatctgctgagccaggcacagcttgagcgcgtcattgaaggcccgaacgtcatcctgccaggcgaagcctatggccacatgatcgtggtggacgtggcggccggggtagggcgagacaagacggtggccacccatatgaaggtcatcggtaacggggaccggatgaccgccgaccggcgccgtattgaggtggtgggcgtaccggtctacaccaatacggaggattggaccccggtggcggtcaaggtgctggagtacgccgcgcagttttcgaacgtgacaatcatcgtcgacaccaacggcatgggtaatcagttcctcaagcggctggtggagctttctggtggtggtatccatgccaagggcgtccggtggggcgagctgcctttcagcaacgaataccgcaaacgctttctcaaccagcgcgcccagtgcaccgtccacgccgtcgaggcgatcaaggacggcgtggtgcgcctgtcgcgcgactacaagaaggatcttatcgaccagggcagccgtattccgtacttcctggacgagctggggcgataccacatcgcgcgcaaacaggacatggcggcggaaggcctaccatccccggaccttttagacacaatcgccatggctttcttggagtcggccgactacgtgcccgcacaaggtgaagctgtcagcatcagtactgacagacgacaggccgctctcgacgccgctcgtgaagcgctcgccgggatcacataacaaacaatgttttgataatggttattcccctgatatgctggcgtccgccccacataatcggaataaaccttatgagcgaatcaccctcagcgccggcgccgctcagctctggccacctggaacgaatcaagcaagatgcccggcgcggtattggcgccagctccggcgacaccctgaaattggtgggcgaactgggcgaccacaaggccgatatcgaaaagctgggcacggcggtggccgtccttgctggcgttagcgccaaagccttgcaggttggcgactacaccgaattgcacgagcgggctctggcagccaatgccgtgaccagtaacgtgcgcgtggagctttcgctggccagcgctgatggccccagccaggaagaggtgaatgctgtttcgctgttctatggcatggccacgcccgcggtgcttctcgacctgataggtgacctcgggcggcacaaagtggagaacctgcgccttatcggccaggtgaccgtcctccagtcatccgagaacagttggcagtctggttatgacgaaggcagacgcatgggtaccaagctggcgctggcagagcgccggaactctgaccgttaccaatggctacgccgtcgccctctcgacgctatcagcgccggcggcgtgttcgcgggaatgacgccgcccaacgtggttctgaatggcgtggatctggataacgcaatcgacgccgccatgggccgaggcgtgagcccatgaccgttttcatcatggaataccgcgtggtcggctactcgttggcgcatgccttatcgaccaatccgaaagccggcaagaagattttcagcgtgaactctgacgatatcggcagcacggacattctcgccgtcgtcgaggcggcttcgcgtgctgaaaacactcccgatgggtttcgtctgttctcagtgcgcgaccgtgacgcccacacagtggtgacgccatgactctggactcaatcgctttgtggttgggttatggcgtgatgctcgtaggcgccagcctcttggtgctgctgatgcttctggctgttggcctggttttgtccgcaaaaatcaacctaatcggcaagtacctgcggttttactgggatctgaaaacactgcgccaggccatgcgtcagcttgagctggatggaaaggtggccagccacaacccggaggcccacccatgactgacgaagccctggccaccctggtggtctgctacctggctggaagctctatcaccctgatgagcatggataccccaagcaaagagcgctacctgtgccggcgtctcgccctgtggccgctctactgggcctacctgcttgtgaagatgggtttcatgctggcgcacgacctgcgccggtaaagacagccccctgcaatacgttttaccaacccccgccaacgccgatacccggcaaatgaggtaatagcaatgccagtacgacacagcgccatccacaagatcgacaagaagcccgatggcaccccggcggttctgcatatcagcagcgccgagcaggccgatagccaggcccgcgacgatctgatgagccaggtcaacgagaactacaacgccaccgccggtaaggcctggggcttcttccacgctgaatccggggcgcacccgttaagcggctggctggcgaagtacttggctggcggcaccaccttcctggagttcagcatcacggccgtcgagcatttgacccggctgatggaagaatcgaacctgaccaccggcgggcatgccctcttctgtcattaccagcagggtatgaccgattacttggttattgcactggtgcaggaaaccgagacgctgaccatgaccgaagagctgaacctgatggcgatgaagcgcttggacctggagcatatccgcctggctgcgcgcatcaatatcagtgagtggcagaacaaccccgcgtcgaaacaatatatttcgtacatcaagggcaagaacggccgcaaggtcagcgagtacttccgcgacttcattggctgccaggaaggtgtcgacggcccgggcgagacccgcacgctgctcaaggcattcagcgactttgttgaaagcgaggatctaccggaagaggcggcccgcgagaagacccacgcgctcgtgtcatatgcctccagccagacgaagctgggcgagcccatgagcctcaaagagctttccgaactgatcgacgacgaccgcccccaggcctttatcgagcatatccgcaacaaggattatgggctgtccccggagattcccgccgacaaacgcaccctcaaccagttccgacgctacaccgggcgcgccgaagggctgtcgatcagctttgaggcgcacctgctgggcgacaagatcgagtatgacgaagccgccggcgccctgatgatcaagggcctgccgactcaactcaccaaccagctcaagcgcgtagggcgctgatcatcgccccctggcgccagcacttgctggcgctcacccatccactcaggtaggaagccatgaagacatcaaaatccattcgggcagtcatccgccgtgcccgtgcgcaggggcgcgccgaagcggtcacgatcatcgcgggcctgtgcccggagactggcttagatcagttctttggctgttccgccaacggggaatccggcgactacagttcgtactgggaaacgtccgtattgcgacgtgtgctgtgcgccgattctgaggcgtgcgacacaatcgaccgcctccagggctcccatgagtttctgcactacgtccaatacgaccttaagcgggctcaggaagagctggcgctgctcaagcgcactcctgacgctcagataagcctggacgccgcccgctttcgatacatcgcccggaagatgctcagcgccttggcgcggcagtacgccggcgacgtgtccgcagaacttccagaggtgctgtccgggctcgactctgcaatgggttacgccggggcactgctcttgcaagaccaggttgccgccgacgccccgcgcaacgtcgaagcgcttgcggcgaaagcatgatcgatgcagaccgggctccgatacgcttcactgatggcatagcactctgccatgtgggctacatccccggtaacgtaagcgctgagctactgtctgatgaagaagtggccagattacaaaatgtgatccaatcgatcattttggatccataaaagctgtttttcagctgaaaaaatgtatagggatgcttttttgtggcgtctcagtccaaacctgaaaattgagaaggacctatctgatgattttgaaagcgtacagggatgcgcggtttcagtacgtcaaggcgcgcgattttgcggcgttcagggcagacagtaagtatgtgacgggcattacgcctgattcgcttgagtggctgttgccggacggcacaacgctcaagtcgttagaggcagtgttgcctgacttggtacggataaaccgcggggtgctggtcaagagccgccacctcacgcaattggtccgcacccgagtggggggcagcatcgccatcactgtggtaacgaccgtcggcgaatttaagctggcgcgccgcaactgtgcgaaatcgataaaagaacagatagagctcaacctggggagcgatgactcctacacctacacaccggaatcgccagatgaaatgtgaaaaagaacccgtggacctgtcggcgctcatgggagccacgccggccccaacagtgactgaggcccgcgcgctgctactgtccaaagtgatggccagccagcagctgctcagtgagcaattcagcaaaattgatcacccctttgcgaccgatgacgcgaaagaggatcacgagctggcgcgtgacgaattccaggcgctcatacgttgctcaatccacatgccggagtctgtcgagggggttcgcttcctggaaggctggcacgccaacaggatggggcaaatagagctgctgttgacgcacgccaaggccggcaatcaattggtgattggagagggggccgcccccgcggtagttagtgacgaattcgccagggggatgcgcgccgggctgacgatagtgcaggcactgttccgggagttccccctgacggtgatcaccacgcaagtcgaagaggaagaattgggcgtgtagatgccgcgcaacatatgcaagcacgcccacacggcgggttttgcttttctgttaagctgaataaacattctaagaatcattttttttattcagggggaaacgatggaagtggcgcggctggtagagctgatgggaaacaaaaaggctgttgctgaggccttgggcttggctttccagacagtttacggttggggcaaacatgtgccggccaaacaattgcctacggtgcttatggcgctggaggcgaagagcgtagaagcggctgagctctccaaactcctggcgcgggaagccaaggcgctgcgcatccagctgaccactgagtaataccccgcgccggcatgcaaaccagcggccggccaccatttcccctcatgtgaaactgacgccctggctatctatggggtgtggacatgatcgaagagtcgcggttttatcgggaggtgcgcaggttcgccaccaccgagcccacttattccgaaaactgccaagtgatccgcacgctgcccagcgagcgctacaacctctcggcggttgctcgacgagctttcggggacgccacagaaacccgcgtgattctcgcggccgcgggcctggccacagtcgggaccgagctcaaagagcaagacctggtgctgcccaccgtggcctacctgcgctacctcaaagacaagtgtggcatcacaaccgccgttagagtggtgcgctgatggcgggcaaggatcagggaaaatcaaacctcgtacaggactcccgcaggtcggccaaagaggcccgcgaggcctttgagtttgacctaaagcgccggcttggtgaccaagcaaaaatcctctctgccgacgacatgggcgggctgtacgagccaaagcgggggctcttcacgtcgattgacggcaagccccgcatgctcacctatgacgatatcctggccttcaaggcagcggtcaaagacatccagcgcatgcatggccagcacagcaagcaggcctccggtgggattctggtcaagaaggtgatcgacctcgcaacgcctcaggatcgcgagcgcgccaacaagcagattcacacagcatttccaacggtcaaccgcgccggtggcatcgtgcagttccaaaccaacgccgggcccaactccaatgtgtcgcgccacacggtaatggtgcagttcctcagttatgacgccgcggtctcaagtgggttgccggcggcagaggcagcaaaacagctggcgcgcggcaaagtgaaatatgactgcgactgcaatcgccataccttctggtttcgctatatcgccagcattgggaacttcaactatggccgggcagaggacggtttcccccgaatccgaaaccctaagctgtatggggtcgcctgtaagcacgtcgtgaaggtgatggccacgctggggcacgcaggcacgttcagcatgtttgctcggcgcatgatcgagcacgggcgcaagacgctgggcgacaagcagaaaatcatgacggtaaaggagcaacaggcctttatcgacaatgccgcgtcagcccgcaagcgcgacaggacaatcaagacctccgaagaaaagcgcctggagcgcgccgcgcagcccgcacagcaacgtaaagccgctgaggcagccaaggtcaaggcggcgaacgaatcgttgcgcaaaacgcacgcggacaaggtgaacaagccggtaccgctcgacaaaaaaatcaaggccatgatgaagctgggctattccgaaacagccgcgcgtatcgctatcaccgccgccgacaacgcacagggttaaaacatgctcaacaatgtcgccattgcaatgaacagggccaaccgccagcgcacgctccgcgagccaaatgccatcgactgcgtgttgttcaccaaacaggtcaaacgggaatcggacagctccagctatgacggcttccccacgctgggcggcgctggcgtgatgagcgatgaggatgaagtgaactatgactgggtgtatgcctgtgacgccaagattcacttttctcagggttatgcggcgccgctgggcaacacctcggacgacggcgggcgcctcaactacccggaaggggtcacagaagcatctgtagagcctcttatcgcgcccggtgagcctggccatgtgcagcctgccaagcggatgctggtggcgttgctcatgggtgacgggctgatcgttaactacgaaatcgtagacgtaaccggcaacgtcaatatcccgccctacacccgcaaatatctggtcaatccgcgccctgatgaagaggtgacagcggattattcgacgccataaaacacgccgctggatggtgcaaaccgccatccgggagggctcaaaaccgcctgtacgctgaccgacaaatgggactaatgcgtacagacaatggccgacgaaaagaaaccgaaaaagagcctgctggggtcgctcgccggcgccaccaggcttttgttgggtgaggtaagcactgagcccaaccggatggaaggaataagcaccttcgatgctgattacgtcggcattgaaatgctactggggtcgagcgagcgcccggcccggtcgcgatcagcgatctacaccaaatggcactacatgattcaggacgggctgattagcaccatcctgcggctgcatgtgcaaatggcgcttggtggtcacgagaccactggtgagaccattttcatcgaagccaagccggatgcctcggcagcggataaaaaggtggtggaagagctccaattcatcgcccatatcctcaaccggcacgcccacgggatttgctttaacgcttgcgcctttggtgacgcctacgcacgcctgtacacggagaaaggcgtagggctgatcaccatcgacactgagtcggtattttcgcccctggtgcagcccttcgaagagctcggcgccaccgtgggctacgtggtcagcattggtccaaagcttcaaacccgcttcaaccacctgaaaatggcccgtatgcgcatgcctcgcatggtgtacctgcctcagatgcgggcggtagagaacgcccaaaagatcaacctggaagcggacacggccgaagggctggtgccactgccggcgcttgtcggcggctcgttcctggaggccgcggaaaccgactatgacaacctgctgtcatccctgcgcgggatgatcggccagcgcattaccggctcgattgatgaaaccatgatcggcgccaacctctcggacatgacggcgcagcaacagaagctgttcatggactcgctggaaaagatgcttaagagcatgaaggaccgggcagaagaggccgtgcgaaccggcacctacgccacatcgcgaaacttccacatcatgccgaccttcaatgaaaagcagctgacacagatcagctcgtttcagggcggctccaactccggcgccggcgccaacattgaagacgtgatgttctgcgctcgcaagctggcgggcacgctcggtatcgacctatccatggtgggctttgctgaccaactgtcgggcggcttgggagagggtggctttaaccgcaccagcagccaggcggctgaacgatccagaattatccgcacatccttcaccgtcatggccaacgacattatcgaccgtcacatgctggccaagaccggcaagtgctgggcggatgaagagcgcccctatgccgtgaacttcttcggttccatcgcagcccttgaggctgaaaaacaggccagtcgtgagcgtgcaatcaacggcggcgtgatgttgctccagggcatggacctgatgcgaaccatgggcctgccagaggccgtgtgtgagcagttcatggccggaatgatggagatagacgccgacaaggccaagattttcgccaaaggcatcacagatgcaaaaccgccggcgccagatatgggcgggggtttcgagcagccgctgctgccggacggcaccacagatactgaggaatgatcatgcgagtacgcactggggtaatcagctacaacctaaacgaccgcggccgccattttgcgggtcaagatcgaaaagtcgatatcgaagcaacaatgcgccttctcaatggcccccaggtgcaggagctggtgaaaaagggtgatatctacggttacttcggccacatgttccgtgagaagtacggtctgaacgtgccagagaccgcgattgagggcggtaaagtggtggtgcttgagccgaacgtcagaacggtgatgatcaagtgtctgcccgacggcacaatcaagcatgagcaggagtttttagacaacgcaccggggcgcattgccgcccggctgtacgccagcaaggcctacgggttcagttctgtcttccacgcaccggaagagaacggcctgcgcacccccaagacgtttcacggcatggatttcgtcaaaaccccgaactacgacaccaaccgtggctacgactccatgcttgatagcgtcgaggcgggcgctatcggctcgctgggcttcgcgggcgagtgtgcggccctgatggatagcattgaggtaatcattgctcagagcgatgctcaggccgcggaaatcagcgaggcatacctgcaccagtgcagagtcaacgatgacttgatagacctcaatgctcgcctgatgctgcgtctcaaaaaggccggtgccggcgcgatgctcgatagcgttgaccctgacacgcttcaacggggttcggagttcctgccaagtcgcgccacggccatgcttgatagcgccgaccgtttcatggcggccgatctgcccggccttgagaagccccccgaagaggtcgacgccgacaagaaggctggcatcatcaccaagggtgtggagctggtgcgaaaagtcattgggggtgtctaaatggccattctcaatgctgacagcgatgggtttctaaccggtagcgcttccgaaagccttgataagatcgccaaggaaatcgaaatcctcaaggctatccatcaggacacgagcgctacgcttgagaaactgagcagcattgccgctgcgctcacggggatgccgcccgaagtgagcgcgccagcaaatgtgccgccagtggtcgtgcccatcaccgcgccggcgccggcgtctccaccggacctcattggcgaacggccgccggcaatggccgaaattgcgcagagttcacaaaccactgccccagctacacctacgccacctacggccgtgcagccgccggcggctcccgccacggccgaccactcaaccaagatcattgttcctgtctccgtcacagtgctggcacgtaaccctgaccacaatacagaaccttccccagggctatcggcgccgctcgtgccctcccaaacattggcgccgagctcgccaccagatcgcgagcgcgacgaaaatggccgatggcggcgccgtgaggctgctcaaggtagcgcgccagccgccgcaaaggcgaagcctgaggacgacgcgccaggggccgacaaggaaagccgtagttcacacgccatggaagacgcggccgacacattgaagggcgtggccagcgccgtcggatcaggggcggaagggatagacccaacagtccaggccgttaaggaagtcagcggcatattctcgcccgtggtgggcgttttgaagcctgccgggcgcatgctgggaattggtcgccgtccagagcagaaggctcagcgcgaaaacgtaacgtggtatcgccgcatatggggtgcggtcaaaggtgagcgtggcggcggcggtggtggtatgggcctcgtaatgaccgccctgctatcaatgcttggcatgctgctggcgccgatcaaggcacttgcacgcctgctgagcatgggctccatggccaagcttcttgcaggagccgccggcggcctgggaagaatgctcccagggcgccagcgcaatcaaaaacccggtgccacacctgatgcgaaaaaacgccctggccgtccgggagctcctggtggcgcctctgatggaaaaacccggcccggcggcacggttggtgggcctgacggcaaaggcaagccggcttctgcgccagtcggcccggatggcaaatcgaggccaggcactgcacaagctggcccggatggtaaagcacgccccggaagtcccgacgcgaccagcaaagccaaaggcgccggcgcggcagaagccgccgccaatacagcgaagaaggcaccaaaggggcttttagggaaggggcttgatctagggaaatccctttttggcaagaccgggattcttggtggtcttaaatcgtttgcgcggaaaatccccatccttggcacattgcttggcgggggcatgattgccagcgccttcatgaaggatgaagaccccaacgcaacgccagaagaaaaagctgcgaacaaagcagacaagtggggaacagtcggcggcgttgctggtggcgccgtgggggcaatccttggctcttttcttggccctctcggcacagtggtcggcggcattgcgggtgactacgtaggctcgatgctgggcgagtggatgtcgacggtcgatttcactgcggtagtagcaacgatcactgatacgttttctgatcttgcgtctggcaccttggacttggccaagtccggtttcgagtcgctgaaaggtgcctggaacagcatggtcgcttccggtaccgaaatgctccaggggatgacagatagcgtcaaagaggcctttggaaaggccgttgactccctactgaacctgaaagacgtagtttcggacaagatccagtcagccaaagattacgttggcgaaaaggctacaggcgtaaaggacgccgggcagaacctgttgaataccgtcaccggtggccggtacgaaggcggctcaaacgcccgcaaagacgagttggtgaaagccatggacgcaggcgggatcaccgaccagaagtcgaaagccatgctgatggccaacctcgaccatgagtctggcggcttcacaaagaatgaggaaaatctcaactacagcgccaagcgcctacaagaggtgttcccgaagtattacagcactcccgaggccgcgcgggccgacgccaacaaccccgaggccatcgccaacaaggtatacggggggcgcatgggcaacactgaggccggggatggtttcaagtaccgcgggcgtggtgacattcagctcaccggtaaaaagcagtatgaggacatggggaaaaagctgggcgttgacctggtgaacaatcccgatctggccaaagatccaaagatttctgctcaaattgccgtacagcattggaagagctccggtgccgaccgcgcagccatggccggtgaccaagaccgagcccgcaagctcaccaacggcggcacgaacggattggaggacgtgaagagcaagtatgacgggtacctggcccaggcgaaggctggagacctcacgcccagccgccgcgccgatcaaggaacggtgcaagccccggtgggcgcgaatgcggcggtggccagtaccatggctaccgtgcgaggctcgccaactgttggcgttacccctatagccccccagcctgcaaaggcgccggcgctgcccggcactcaaactgtgggggttatggctccgactgctacagcgccagcggttgcagcccagaccattggcgtagcatccatgcagcctgtcagcgcgggcgtgctggccgcgccaagctattcggccccggcgcctgacgcagcatccgtcaaaatcgcgccaacaccggtcattgagaaaccactgatgggcgccagtaagccggcggcggcaccaagcgtgcaactgtcggtaccgctctctcagaacttggacgataggcagattgcccacgtcgctgccggcggaatggggatgggacagcggctctaaccgcgcaaatcactgcaaaccgccccgcaatagggcggtttttgtttgtcaccatgtgatcaataaaccgctaccggtgccttatggctgacgacacactcaatacggacctgctatttcgcatgattgcgcactgggtgggtaccaagccaaacacgtactacggatcgagctacggcgcgcccaccgaggacttgttacagaagcctctcagctctcctattgccgacgcctacctggccaagatgcgagaagacattccagtgcttgccgcgttgccggcgggtgtcatcaacatgcacgcggaaaatgacggcatcgaccggaacaacatttttatcgaaatcaacggctcctatgtgagcctgtcggagctgggggacgtgaaacgtggcagttactaaggatgctttcctacaaagcgctatcaacgaaatcgggaactaccccacgcttgcgctgcgcttccagattggtgacccgctcatgtcgcaggggcttgcctctatggctgccatgctggcggacctgagcaaccaggtagaagtgaccgctggcgagccgttcaccaaggcccgtgacgtgaccgtacgcagcgatgcggccgttaagggcatcttgcccttcgccacgccctcaatcgctaccatcaaggccacaaacgggtcgctgagccaggtgcaggtgctggcggggcgatccatccaggacgcggccggtcgttattggctggtgatgaccggcgctacgattcttgccggtgaatccaagaacctgacggccaagcaggtcagcccgcgaacctttacgcacaaggtggccacctactccccgttctaccccgtgcagctcagccagccagaagtcggatttatcgccaacgtacttgttgaccagtttgagtactccacaaacttcgccaacatcgcggacggcgcgcgggtttacaacatcaaatccaatgagctcagcgagctcagcctccagtttggcattgacgggttgtccgggtaccagccaaaggtcggggaagaaatcagaatcaccattcaggatacagagggcgcggtatcgctatccatggggctcaagttctatttcgagtacaccggcggcgccagcgatgcaatggtgaccatggagctgacagaagttactcaggccggcgccgatccaatggacattggcacgatgcgtgagatttgttcatatccgggtatctacgacgacagcgccgttttcggctctaacttcgattttgtggtgcgcaaagcggtgagcccggtgacgttcctcagtgtctggaatgaagccaaagaagaagctgtgcgcggcccaagcctggataacatcaacaccttatttgtcgcagtgcgcaaaactggtactacccaggcggtgcttgagtcggaaattacggctgtgattctccgcgccgacaacagctataaaatccgttacatcccggtagtcgatgtcgtggtgccgatggtggtcactctcacaattccgtccgtttacgattccggcgccgtcatgcagcaggtccgaacgatcttgctcaatgaatacggccctaaatccgcttgggcgaagcgtggtgaggcgcagattctggagaaagacgtgtatgcacgcatggttagcaacaacgtcgcagcgttggccgcccgccttggcaacctcaccatcgacagcattggtgatgacggcacggttctccctgagcattacaggtatatcacccctgaaagcctggtcatcaatttgagagaggcggactgacatggagcttatgccgcttgttcgaagcgctgaatttgatgatgtggaggcagaattcaaatcgctgttcatgagtctttaccatgaacatattggcgaccaggtagacgaggtagcgctatacggcatgcctcatatcgggcctgattcattggttgagcgcggccttgttgtcgacggcctggcagttctgcgcaccaccaccatggaccagattcggcacctattccatgcctggcgctaccgcaaccctcagcggggcaccaagttcctggcggcctacttgaacaccttgttcggtcctgtgttcacgattgatcagctgtggtgcaagaaagctggcacttaccccgtggaccttatgagcgaggcagaaatgctggccgccggtgaaaaggaggcagactatttcttgaccagtcgcctgcgggtagacatcgaaaccgagattgtcccggtgcgaatcctcaaggccgcacgcacggcggtagctgcccggttcgttctggagctgcgcgctgctcgccgaacaaagctgacgctcccagttggcatgatcgcctatagcgtcaatatcgtgcgaaccagcggaacatctctctaccagcagccagaagtgtggagctcggccactgtcggcccggccactcaaggcggtggttcgaactttacctacagttcgattggccgtttagacatgcaaacctacctcaaataagccatttttccggctgtacgcttgccctaaatatccctcgggggctttatggcaaatcctgtaattatcaatcccacgctgacgctggcgggccaggcggccgcgttcaacgccagcaatgacggggttgagctgaaactaacccacgtgtctttcggccgggcacattacgacccaaccggtgatgaggtggtactcaagtcgccggtgggcagcaaggttcagctcgccggcgcaagtcgcccgacgctctatcaaatccgtatggtcagctcgtggcgtgaggacgtgggcgaggtgccgattgcggaaattggtttttggtcaggtgacgtattggtctttgtttggtcgaaggctgacggaacgattgcctcttacaagactgatggcgtctcgtacgttttgttcaacgatcttgcattcgcccaggtcccggccggcagcattggctttgtcgttgatccaaacgaaagcgttgcattggcggctctggtggcgcatgagggggcggcaaatgctcaccctcagtatctgctgcgagcggatgttgcgaaggatggcgggccgctggcgtggcttggtaccgccctcggaactgcaaacacgctaggccttgccctccaggcaaaagaatcggttatgcctgcatatgcgcctggccagcgctttcagttcatcgcgaagttcaccaacaccgcgtcagtaaccgccaacattggcgcgcgcggtgcgaaggcagtcaaaaaagccggtgacgcgggcctcattgatcttgagcctggcgacatcaaagcaggggctatgtatgacctcaactatgacggccaattcttccagctgggcggcggcgtaggctccggcaaagcgttcgtgcgctatccgtttactgcctctgtcgcgcagacagtgttcccggcggaccataccgtgggcgccaccatcgtcctgcgcgacggccgagaggtgaccgattacctttctgacggcgccaagatcaccatgcgtaccccctgcgaagtgggcaccagcgttgaggttctggccttcaagtccttcaaggtggctgatacctacacgaaggccgagcttcaagcgctgctcgttacggcctcaggtgttcccgtaggtgcgatgctgccgtttccgcgcggtgtgttgccgcttggcttcctggaggttgacgggtccaagtttgacccgctgatgtacccggaccttgcggcctacctggggggctcaacactgccggagtcacgtggtgagttcctgcgcggctgggaccataaccgtggcgttgacactggccgtgcagtgggcagcttgcaggccgacgactttaaagcgcatgcgcacggtttcggcgtagccacgattgtcgcccagggttcaggcgcacaagcactgtcgggcgggatcacgccagcagctgtaacagccagcgtaggtggcgatgaaacaagacctcgaaacttggcggttatgtggtgcatcaaggcatggaacgccccaatcaatcagggatcgattgacgtaggcgtgttggtgagtgccgtccagggcttcatgcgtgacgaggccaccatcgaagaaatcaccacggcgccggacactgccagtaagcattgggtgtctgtgcgccgcctgctttccgtaatgcttctcaaggctgatctcaatagtccaactttcacaggcgccccaaaagcaccaacgccattgccatgggataaaagcaaaacgctcgcaactacggagtatgtaaccgcggcgctgggtagttattcctcttatggcgtcattacgggtaaccgagccctgttggccaccgaagtaggtggtctcctatggttcgccgggaactacaatctcgcgcttcctaaaccgtctgcattcgatgcgccaatccgggcatcatttagtgtttttgcaacctctattggcggtacggttgtccctcagccaggcgttgttctccaagaccaaataggtgggcgccctgcttctttccgggttgagccaggacagtcagtccgcatggtcgctatctcagataccgaatggctgatgattgactctaccgtcagcctcgacaagaacttcgactttcgcgtatcgaaagttgctaacggttatcgctacttacccggtggaatgttggagtgctggggtacttcatccggtacaaccgataaagctagcgtgacctttgctcagcagttcgcggaagctccgtttattgttccgtacgacagtattggagcaggcggcacagttatgacgatgtggcaaatgactgatgttagctcaacgggatttgttgcgctaaacatgggctcgcttgtccgtggaaatacaagtttcaatagtccaacagcctcgcaatgccggtggcgtgcctggggttgggtaaataaataaacaggggtcaaacatgtacgcgaagtggattgaaaaagacggccggtttggcttttcctctgttgacaacggcggcgtcaacattacagaaaaacaacatataagcctgatcaatggcgaatccgaaggtaagcgcatacagccgaacagccaaggctacccggtactggtcgatatgcccccgccaacccaggagttaatcgccgcacaggcccgccagtggcgagacgccgagattgaaagcgtgaaatggcttcgcgagcgccatcgtgacgaaatcgactcgctgcggccgacaacactgaataccgaccagtctggcgagcttcttgattatgtgcaggagttgcgcgactggcctgcggcgagcggctttccgaatgagggccgccctatcagaccgtcctggatagcaactcaaagcaagtaaagcgcttggccagcactcgctggccatgcctcaagatgcttgccaacggctggccaaactaaaccagaacaacctacggaggctgcgtaatgagtcgcgccgacatcttggctacaaatgaccagaaagtgcaggaacacgtattaaacggcgaagcaaccgatgctgagattctggcgggagacagtgaaagcaagcactgggtctccgttcgtcgtctcgtcaaagcattgaagacgtgggtaacccccccagtagacgaccgtagcaagagcgtgccaacgacggagtacgtgtgcaatcaaattgaaagcgcaaatcaagtgttccccgctcaggtatttcgaaaaaaccttttgataaatgggaacttcgatgtctggcagcgtggtgtcgggggctccattctctccggcgccgaatacactgctgaccgttggatggttgttttgcccatcggcatgagagcccagtgggcccaggagctgtttgaggtgggtaccgggtttaatggttcgcgctggggtctaagcgtgaactacccagcgggagtgtcgggcgcaaacgtacgtcagagaatcgaaggtgtggaaactggcgcgggaaggactgtcactgcatcgttctatctgtactcgtcggtaaagcagatcgtttctgttggtttgcggcaagtgttcggcacgggtgctggtgtatccgctgatgtatcccggactgtagatgtagacgcggcacaaggtgtttttaaaaaatacaccgcgacgttcgtgatgccttccatcatagggaagacaaaagcatcaggcggcaacgattttattgagttggtaatcacttcgaaggcagaagttgcccatagaatcattctttcttctgtacagcttgagttaagctcttttgcgactgattatgaaatacctcgacgccaacaggaactcgcgttgtgcctgcgttatttcgaaaagtcttttctcggtgactttccaatagcatccaacaatggcccggctacttgcttggctaccttcacgcaggctagcccagcaagctccccacagtcggctatgcgtatgaattttgcggtaacaaagcgcgtaattccatcgctgaaactgtactcacctggggcgcaagataaccaactgtgggcgcagacgttcggcgcatcttgttcgcagacattcgttcaaagtttgtggcctggcggtttttcgctttcttgcacaccgcctcccggctccgcgccagggcatacgctgcaagttgaatgggtagctgacgcagaactctaaggtgacgatcatggaaaaagttgaatacaagcactcccaagtgggcgtgcagcgcgtatcagatggaatgtttatcccttccgatgaaggcaataaggattgggccgcttatttgaagtgggtaaaaggcggtgggcagacgcttcccctttccagcgctgaggaccaaaaggctgccgaacgtctgtggcgggattacgaacttgagcgcatcaggtggttgcgtgagcgccatcaggacgagctggagctgaaagctcaaacgacactcacctcaagtcagtacggcgagttgctgacctacattcaacagctacgtgactggccagcatcgccaaacttccctgagccagaccatcgccccgcgccgcccgaatggattgcgctacaggtccagtaacacctcgcaaggtgtttgcttcgagaaatgcaggtgaacagtctgtgcggcacgccgccggcagactacgagggttgtatgggaaaggcattaaacggcagtttcgatcaaatcaagatcggctttgcgcactacctgaaacgctggcgtgacgggctttatcccgactatgccgataccaaagctgtacaggcgttcatggccaagccatttgacctggccgtcaagtgggcggcctctcgcatggtagatgatgcccagtcgatgctggaggcctaccagaagaacgccaacggcccggatggaagaaccaccctcttccccgtgctgctgctggcgatggatgacacctttattggcacgggcgctgactggggcggcttgcacacagagcgcaccatgcagcagatcgtcgaaggcggctcgttttacggctacaagcaagtgatgcaggatcgacgcctacagatggtcatcatcgccagcgaggcgggatcagcgcaaagcctggccgcgcaactttcgtccttcatcaaagcgccatccaatcgctatttcgatgctccctacagctttggccaatacgcggtgccaatgccgcagacgctggaatctgtccgcattgactggatggacgttcgcccggacgggatcaagaacatcaagatacttgtggcggatttgacgcttaagtgcaccatcccgttttttgatgcgccccaggaaggcgcgccaaacgacggcaccaagaacgacccgccgggctacccagcaatcaataccgtggcccacacaagccgaagcggtacgagttcgactaccaccgaagcgggcacggtttggggtaaacctaagtgaacgtctacctgcgcgatggtggtgaaatgctgcccacggacgtaatgctcaagtgggttgggcgctcagacttgacgcccatcccccgctcgcttgagttcaccgtgaagctcattgacggcgtgcaggaaaagctcaaaagaggtgcatctgtttgggctggccgggagaatcttcgatatgaaatcgttaaaacggacagagcacagccacttggccaagtgcaaggcaagaatcagcagcaggccatgaaagttacggcattgctgcaccgctgcgcttctgtggccaagcctctcaatagtgcagttgttctcacaaacacgacgttgggcgcgatttaccgcgcgtgcggtgcgttcatgccagttgcgagcgacttcgccgtgccgcgcttcacctgtttcaaaggctacgagccgagctaccagctcgctcaggcccttcaagaggaaggtgcagcattggtgctgagaaacggccagataatggccatgcgcctctctgacatggctaagcagccggctgaggcggacattggccaggtcgacagcagcgccaatatcgaaagtgagtttctacagctccaggaaatcccctcgtattactccgtaaacgaccaagcacagattgttttgggccagatgggccaggccaggcgcgtttcgttcattccgcgggccgatgagcgtcagttgcgtaacgccagctgcgtcctggtgcgaagcaagaccgtggacagcaccatttgccagcagatccaggccggtagcgtattgcgagtggctggcgagaacctggtggtcatcaccgccgcgcacgcctttgaaaacctagaaggcgcgcaggaaagccgcagccgcctatggcttgggaaactgatcaatgcccagtaatcgacaccctggaatcatccgagtggttgaccgcgcccgtcgagaggtgcgcgtggagataccgccgttcaccgacggtgccgccgagcttccgatagctgaaatcgaatacccgataggtgacgactcacgcaatacagagattcgtatggtcgtcgggcttgaggtttggattgcgttcatcgcgggcgatccccgccgaccgatcatcaccggctttcgcaacccgaacgtgggcaatgaagtggcgtggcgccgctggaaccacgacaacatcgagcacaacgcggacgatgtggccaatatcaacgcgcagacgatcaatctcactgccggggctaaaattgtcctcaccgttggcggttcaacagtcgttatcacgcctgattccgtgacagtcacgggcggtaccgtgagcctcaatccgtagggggagttatgccaggtgtatcgcgggtaggtgtggattcagccggtggcgtcatcaaggacgcccttgtcccgtctgtgctggtcaatggcgcccccattgcggtcaagggcgcgggagtcaccgggcacggtgctggcgcgcatgctggacctgtcatgatcggcgccagcgccacggtgtttgctggcggaattcccatctgccgagctggtgatgcagcgacttgtgccgatacggccagtgggtccgccaacgtgcttgccgggtagcgcgtctactcaggcgccttgtactggtcaagcgccccgcgatggatcatcaccagcatggggcccatctgcccctcatcttccaccaggtgatattcaggcaggtcatttgcctgaatgatttcgcgcaacatgcgattgaattccttaagcgagcctgagctaccgctgcgctgatacagagtcttgaagccccacgttgctgaatctttaccagccgccttgcgggccagcctgtacacgaagcgccccagcgctgggtcaataaggaaatagtcaggatgcaccgtaagcacatccggctttgtgccctgcgtcacctcttgatacatccaatcggcgatcttaatttctacatactcgacttttttggtccctgggttgcttatcaccttaaacgggccaatcaggttttcaccctccgtgatggtgatgggcttgcccttaacggtcttcgtgcgctcgattgctacatgcgtcgtgctgagtcgttgtagggcgggcaccactgcgtctttctggttgccaccattgtcctttcggcagaacttgagcacgtcagaaatgtgtggcttgaatatctggccaggcttatcccccttcccgtcccggtagcggttcattgcgtcagtcagatgcgatacggccatgagcacgatgtcgtaatcccacactgacgccatcccgtatacgcctgatgaaacctcaacaaaaccgtccggcaagtcataccgaatgattgagttggcccgcttgtccttctttgaaagccggaaaacagcaacatccatgacgccacggctatcacgggcgcccacgtcgtacagtggcggagcaaagaagtccccttgctcatcgccccgtggcttggagcgtaagctggtcggagccttttccgcgggcttgcgtgccggtttatctgctggtgccgctgtcttggtctccggttcagccactgcccctaacaggtcgccctgggccgcagattgcgcctgcatgcgtttcaggcgctgctcattccgtgtcggcgtagcgttcaggctgcttttcattgggggcgttttcctttcgcgcaggggtatcaggcagcatgcaaccgcgtaatggtcggcacttctttgtgtttcgcctgccagaggtcgtatgccgactggcggccaagccacatatgggccttgcccaagcccgccagctccaaacgccacgctagatcagcgctaattgctgcccggcagtgcaggacgctggacagttgcaccctggagtagccaatgtgcttggccagcgcagtcaccgtcatattgatgtcgggcagcacatcttcgcgcagcccctcccctgggtggggtggattatgcatagtcatcttgtgttctcctgtcagtggtagtcgagatagtcgaccagctctacatcagtgccgataaagcggaaaataacccgccagttccccgacacgctgacggaccagaattctgtcagctcgcccttgagtggatgcagccgcattcctggctcgtccatgtcgtcgggcaccttggcaatgtccaatgctgacagcacacgccgcaagcgggccgcgtgatcagcacgcacccccttggtgctgccggtctggtgcagagctttgagccctttatgtttaaaagtctttatcatgggtcaaagtgtaaagcctagccatacactctgcaagcgattttgtatggttaggctttacacttttagaggttgaatcgcgcatgcctactgggcgaaggtgggtaatttacgtgtttaacgcttgtggtcgtccgggtaagtgctatttgcggggggtagacagtaaattacccaccgtggggcggggctctgagcccttttacgtaaattacccaccgaatcccgtacaacacacactgcggcccgtacattacccaccctgtcccgtagattacccaccgatccacaggtttactcacaggttccggccgaggacgcgcgggcactacggccggttatcaacaccgggtaaaacttagatataaaaacccttaaaactaaataaaacctttatcagccacaaaaaagagccccacgacgtgcatcacgctgcaaagggaagaattcgacacgtaatttcggcccgcacaatggctccctgaatccactccacggggggcagtcatgcctgctacgaacactctcgatttttccaatgcccaggccgccgccaaggcgctcaaaaaagtcagtcaaatcatgattcgcgcggggcagccggtggtttcctccgaattcaacgagaaatcccgtcgtattgcgggtgtgacctaccgggaagcgacgttgacagtcgcgagtggtcagatggttgttctgcgcgtaaacgtcactggcgacattttccaggtgaagctcaacggccagcagctacctatcaagaatcaaacagattcgacccaggccatcggcgagattgcagcgatgcttgaaaagaatcaggtagcgtttcaaaagacccaggcgcgtaaacaaatcgccctccccaagggtatgacgacgccagctccgaagcaggcagctgtgtacgctgagcgtgtattgcagctcgacacccaaatcgcggagcgcaaagcaaccgtcactgatttacagcagcagctgggcgcaatgactgacgcattgccgtcgactattccgcctgagctggatgatgcagcaaaagacacgctgatagcgcttgccgaagtcggcccgctcgatagcggcgacattcccagcaagcaggggctggacaccctttttggcttgggctttgttcagttcgacgagaaggcgcagtacgtaattaccgcagcgggtattgctgttgctgcgctgttggcgcgcccggtaccggaaactcaacctgctacgcctccggctaccgatgctgatcagagtttggcgtgggcgtatgttgctgcgcgtgaaatcgtttttgctgacccggtgatgctcgacagtgtagcgactgctggcgctatcgcgcagctgcgggcggctctggaagttgttgaaacgaatgcgccaatcaatgaggccgagggcaacctggaccaggccaatcttgagcgcagcctggccaagtcattcgccacggctatcgccatgctcgatagtgtcgatatgacgatgacggatgccgggttggatgagctgataaacattgcttctgtgtcagctgctgacgtgaccgacatcaaagaccaggcggcgcttgctcagctgctcaaaagcggtttcgttgaaaccgctgagggcctttacatgctgacagattcgggcaagtccgcgctggaagacgctggttacgacgcttacggggagccctttggcgctcaagactagatcgaggtgatttgatataggcgagcgatatcgtcgctcatcttccccagtgactcgataccgcgctggcgcgacatgaagtgcgccagcgccagtatcgccacctctgcgttaccaatatcggtggcaagccgatacttctgcccttgcgtatcaaccccgtcagattcaattcggggccgccacctggctacatcatcagccaggcttatcgtgcacataccctctgcttccttgtacgcattgatcgcttctgccaagtgttcctctttgaacagacagtcgtagtccttgagccgcaaatttgtgacaaaggcaaacccgtcgtcagcagactccctatacgttaccttgttcaataccaccatgatgccgagcgcgttgtttttgaatgccaccaaggtcacaggctcagaccctgagcccccatagccgccaattgaaaccattattttcatccctgcgggtgcttgtgacattcaaaacctcacgtaaatacataaaaatgatgtatctgtgtttacaggataaacaatcaaatgataatgtcctttccgtcagcggctagaccgcgccaacgaaagggattaggcaatgagcgctgcaaatcttaagcggttccgtatgtatgtctggtctggctgtttgctcatgttcgtcctgtacctggtggtgacgcttgcgctgggcggcagtgattacgaccaggctgtggcgcaacacgagtggacgtgtcagatgataaaagaggaaatctggccaaaagatcccgcaattcactgccctgagcccttgcagacagtggcttccaacaccgtgattcgttgagttccgctgcacaatgcgccccgccagacggggctttttttcgcctgcgcaaacacaataacgcattagcgttaatgagtcatagcgtgagagccctattgcgttatagcgtgatagcgctagaatccgcccaccaaatgaaaaagacggagcacgggacatgacggtgattgcggtgatgaatcagaagggtggcgtgggtaaaaccactatctgcttggggctgggcggcgctttgtctgctgtaggttgtgatgtggcgttggtcgactcagatcctcaggggagcatgaacgactggtacgacgagaacacaaatcatcctgtgcaggtctacaccattgagcgcacgcagctggcgtctcagatcccacgactgaaaaacgatgtcgtgattatcgacggcactgccaaagcggcagaccttgccaagaaaacgattgctgtcgcggatatcatccttatcccggttcaaccgtctccgctcgacgtgtgggcaactgctgaaacggtggcaatgattcaagatcaccaggacgctcagattgcagccggtgacaaacctgttcgggcttactttgtggtttcgcgtgctattggcaactcaaagctgagccagggcattgcgaaaacgctcaaaggttatggcttcccagtgctgaatacgcgccttgtctcccgcaccgcgcaccctaatgcccaggcttctggccaaacaccactcgatactcagcccggcggcttggctgcgcgtgagctgcgggcactccgcgatgaggtgcaggcacttatcgcgcagtaaatagacgttaatgtgttagatgcactatgatgctcgaaacgccgtaacgttaaagaggcaggtactaatgagcgagttgaagattaagccccgtgctgcacggtctgtagaggacgttctggctgatgtcgatgcggcagccggtcgcccgagcgcaaaatcaacagcgcccaaggtcatcaagcttggcgccaaagagcgcttgaacagctatgtcacgcctgagcagaagcgcaagctgcgtcttcttgcgattgagcgtaattgctcaatctcggaaatcgtgggcattctgactgacgaggctaaaaccccggagctgtagcggttgcagaagtaccccgaagggcgccagacggcgcccttttttgtgcttgatgcctacccggaatctctccccctttgcgttgaaactccagtgttttggagcaaagcgtagccctgacgcctgaaaatctggcggtatcgtggctgctttcagggagcggcttcgatgacagacgtttttagcaatctccaaagtgccgcgcatgccggcgctttcggcgtggggtctactgctacccctacgcccgcgcagatccgagccggtaactacgccaaaggctcctttcgcatgcacgggctgcgtatcaccatcgaaacgccaatgtatcagtcacgtcgtggcaaggatgacggcgtgccttggtccatcacctgcatggcgcactacggctacgtcaacggcaccaagggcgccgacggagacgccgtggatgtattcgtgggcccagcgcccgaaagcctgcgcgtgttcgtggtcaatcagcgcgcaaaagacggctcttttgatgaacacaaggtgctgcttggtttcactgaccaggaacaggcctgcactgcatacacaaattcctatgagaagggttggaccggcctagggagtgtggcggcgtgcaccatcaagcaattcaagtattggcttcggcatggcgatttgagccagcccttgagccctgaactacccaatatcccgaaagatgaggccttgagcatgaccgacgtactgacgcgctggggcgctgacaaccttcccgtgggcgaaaccgttggcgctgtgctgtaccagctgcgccgcgcagatgccttgggcctcatgatggacagcgccaccctggcggacatcagcgaaagcctgggcgacggcggcgaaatgctcgatgccatggtgatcgaatataagcaatttgagcgcaaggccggccaactgttgcgcgtgatgcaggcggcaacctcacaggtaaaggccgagagcgttgaggtcagcaaaccattcaagaatcgcggcacgacccaggtggccatgctcttcactatggatgacggccagagcgtgtctgtgttctttcacaaccccgacagcacgccgaacaagctcatgccaggcgacgagctgatcagttggaagtgggtgctgaataaactcgacatcaccgcagtagtggcgccagagcgcggccaggacttgagcccgcgcgtagtcgcccggcgaataatggccctggtgcagaagaacagcgccaaattcatcaaggcgaacgaaggcaaggcagagcgcagcgctgcattggacgctcagaaagcggctgtagaggcaaaaactattgagctggccgccctcgacaaccagattgttgagctgcaagcccagcttgaacagaagaagacagcaccggtagagcccgtcgtcgcgcccaaggtgccggatgttgaaccgtccaacgaggcttatcccgcgtgggaaacggccatgattgcagccctggccctgttgatgggggtttctgacggtgatgcccagggcgtggccatggctcaggacgacctggtaagccaattgcacattgataaaaagacccccgaggaagccgcgcaggccgttgcagccgctgcgcgaggcgcaattgctgagcctccagccaccacgcccgaagtagatgagtcgtcggcgattctgcaaggtccagccgggccggtgacggtcgccaaaaccaaatacttggaaaccggcgagtggggcgtgagttgggccagcacccatatcgctacagctgcaagcaaggccgagggcgtggctatcgctgagcgtgtcattgcctccggcgctgacaatatcgctgatatgcgcgccgtagctgctcctgcgacagcagaagttgagcctgaggaagcaaataccgaaacccttaacgaggtagcgcgccgcctggtaccggacgagttcgtggcagatatcgacccggacgggttcactgctattgcagctgatggctatggtattcgtctgcgcccttcggctggcggtcggatgttgagcgcctttatcctcaagccaggcgcgaatgcgcaagaaagccttgggacaggaaccttggaaaatggcatagagccagcggttacggccgccctcggtaccgcgctcacgtttatcgagaaatggcgcaacgaacaaaccgccctccccctcgctcctgatgccagtgaggataccggcaccattgaagccgagggtcgcgaaaacacggtgaagacggccaagggcaccaaggttgttacaggatttaaggtgatcgaggcgaaaaacctcgttatcagccatgaggcggacggcaccgtaaatccggactacccggctgaaattcaaccccgagaccgtgcacgggcaacgtcgcaggcctgggtgcagaaaaccgcccgcaacctggacccggacagcctgggccgtacccagcgcgccgacagcggtgcgcctatcgtcggcgctgaccgcgctgtggagtcgggcaacggccgcgccatggcggtacgtgaggcctatcgtattggccaggcggatgattaccgcgagtggctgctggaaaacgcggagtacttcggcgtcgatccggccaagatccagcgtatgaaggcgcccgtgctggtgcgtgtgcgcaaaaccgacgtgaaccgggttcagtttgctgtcgaatccaaccaggacgataagctggcgatgacggccacggaaaaggcccgcagcgatgcccggcgcctggatacggccatgttgtcgaaattggcagacggcgacctcaacagcgccgccaaccgtgactttgtagcggcgttcctgcaatcgctgggcgatgctgaggccgcgcagtacctgaccagcgacggaaagcccacatccagcctcatcagccgtctacaggccgcactgttcgctggcgcctattctgatgaccgtctgcttgaaatgaccgcggaccaagccaagccagagattgccaacatcgtcaacgcgctgaatagcgccgcgcctgatttcatgcgggccaaagagcaggatcgtgtgggcgccgagcgggccggtgagcaggtcactgactccctggagctgtcgctcaaccaggaggctgtcaacgccatcattggcgccacaaacgtgctgcgccaggccaaagaggctggcatgggcctggatgagttcctgcgccaaggtgacatgttcggcggtaccgacccggctgtggcggcaatggccgtgttcatcagtgccaacaaccgcagcgccaagcgcatgagcactgcattcaaggccatggctcagttcgttgagagcgagaacgtgcgcaagcagacggcggggctttttggtgatgagccggcgagctttaccgatatcgtcggcgcagccaaccggaagctggaacaggaatacggtgagggtatgtttgccatcgaccaaggcgacatgttcaaccagccgctggccgcgagcgctgtagaacctgaggtgcccccagtgactgagccccaggagccaagcgccgaggacgcgttgcagcaggccaaggcctacctggacgacatcattggcggcacgaccgacctgggcagccctggtgacgtgctcaaggagctggagcggatctatgccgcctacggtgaggattcgttgagcgagctttttatcgaggcctcggacgctttccgtgactacgcgctcaaggccaccgccggagcattctaactgtgaccaatgtagagccctcccccacgggctctaccaaccattcatctaaggcggtatctcatggcacaagaaattctcctggccccaggcctcaccactgccaagtcgacggctgtaaccgtcgcggctggacaaaccgctacccttggcttgtttagtgtggaaggcagcgagaaatcaatattcccagcatttccggtgttgttggcgacgccgggcgcagagaatcgaatggactacctcagcacggaaaagcgccagatcgtaatcggcccaggcacctacaccgtgcagcgctttgaatacaaaggcgtcccctacggcgtattcgtcgacaaataggccatatcactacagacggagcccgccagcgcgggcttttttgtgggtgttctgccagttattaacgctataactcattagcgctttgttgcaataacgctaaaacgttgttgactggtaggcacaacgtgcctatattgacgctatgccgaaagaatcggcgcccaactacaacggagcacgaagccatgacccagagcctgaatctcgatcaactgataggcgccgcatacgtcaccaaagaatttgctgcactgaacgattgcattctgatggattgcatttgtcgcatcgaaacgctgggcaagaacatgcctgaggacatgctgggcgccttcgaagctgaggccgataagcgtggtctgcgtgccgatttgatcctgcctgacctgcccgcgccggtgatcgcagccccgactatcacccggaccgccaagaaactcaccgtcaccctgtcgaacggtgacaaggccactcgcgccacctcaaacctctatcaatcggtagtagtcggctatagcgccaacggcaagttggtcgtcctgtctgcccactggttggccgctgacgcgcttaagactgtcgagaccttcaagtccggcaagtttgtgaacttcaactatcgcgacaagctggttggcgctccgatcatcgtaaatgcctgatcaatatggcccggtacgccgggcacccgaaatagcggagaaatacagcatggccagcacgtcagaccagatagaaagcctcatagcagccggcgctctgttcgtggccaaccattcaggtggcaaggactcccaggcgcagctgattcgcctcttggagcatgtgccagcctcgcagatggtcgtggtgcacgcctcgcttggcgcaatggaatggccgggggcgatggagctggcgcgggatcaggccgccgctgcgcgtctgccgttcattgtggccactgccaccaagacactgctggaaatggtagagcgccgctttgaaacccgcccggaggttccaagctggccatccgcgtccactcgccagtgcacgagcgatttgaagcgggggcccatacagcgtgaagtgcgccgctacgccaaggccaatggcttcaaggtcattgtgaattgcttgggcctgcgcgcccaagagtcgccaggccgggcaaagcgccgagagttcagccagatggctatcagcaatagcgttcacacctggtacgagtggctacccgtgcacgagctgtcttccgccgaggttttcgggatcattgagcgcgcagggcagcagccgcactatgcctacgcgttgggcaatgaccgcctgagctgcgttttctgcatcatggccaataggaaggatttggcgaacggcgccgcccaaaaccctgggttgcttgagcagtacgacgcacttgaaaagcgcaccggctacaccatgcacatgagtcgtatcccattgattgaattgtcggcctaaaccgccctgtaagtcgcggctttggttggggcgggcgctatagtgtttttgcgttatgacgttaaagagttattgacgcataggcacaatgtgcctatattggcgccatgccgaacgaaacggcgcaattcaagcggagtgacacagatgagcatcgccagagagatacaagcaatcaacgcctcggccaagaagatccacggcatggatatctgcatcctagtggcccgcaccattcactttggcaacgacgacaatctgctgattgtcagtggtgttaatcatcgccaggccgctctcgacgttgtgcgggttactcctggggcgacagttgaagaagagtttcaccctgaaatgaattggggcgacggcgaggtaacgcaggcttacacgacaagcctcgtacggttctgaatgtcaccgattcctgtcgaggccccttcactggggttttgccagtaccaccataaggagattcaccgatgccaccacgtaagcagatgtcattgaagcaaatggaaacccaggccaaggccaagtgtttcgactggaacgacaagcatccggccggcacagtagtcagctacgaggcattgctcggccgcggcgaaacccatcgcgccaagaccaatggggcggcctttgtgtccagctgtgaggctgttgtattcattgagggggttagcggctacgtttcccttgagcactgcaccgcagttgaaggcgaaactgtaggcgcataaccgcccgtgcctggaacgccccccttcattgggggttttctggtatcagcaaaggaaaaccaggatgagctttaaacacctacatggcgccaaaccggatgcagctctgcataagccagacgctgcgtacatgcgcgagctggtgaaagcgaccggcttgagccaggcagacgccgccagcgccatcggtatcagtgagcgcgccatgcgcaactacctgagcaccgccaaagatacgtttcgagaggcgccctattcgatccagtacaccctggagcagctggccgctttcccaccaggtggtaaatcatgaaaaacaatcaagttgaggccatcaagcagctggaggcggcgctgtcgcgcgtcaagcgtgcggggctggtgatggtcgggattgatggctcgcttgtggccagcgtgaatgatgaggcgctgaaagttgaaaggcgtgcgcgttcaagcgttgagtcgatccttgatcggattaataccggtcatccgggcactgcggctgtggaccatcacggctcttatctcgacagcggaggcgcgtagccatggccgactcactgtgcactatctgtaatgacccaatggtcgagggtcaggccttcaacggcatgcggcgcgcgcactgggattgcgcggaggctacgccgttcggcgctaccttgttcaatcgcctggtgcctgagcgctcgctggcgctcgacgaggctgataccagccatacggcgccggtagatcgtcccttgccgcgccagcctgagcgtgggcccacgtccgccgacgttcgcctggcggaaatgagtcctgacgcccggcaggtagaatcgcggcgctggatcgaggtttcgcgcagtcccgaaaacggaaagaccaggatcggtctggagtgcccattctgctacgccattgtccgggcctatgtctggtcgctgcccaacggcaagcgttgtgagtgcggcgcctaccacggccgcgcactttccacccactggagtgaggtaaagccatgttgaatggggaaacgcccgtgcctgaaccgcgcccgaactggcgcccgcttgaaactggcggctacgtggttcgaacccaggctggtttccaccaggcgcgcaaagactggttccagcgtaatgggtttgatgaccggagcccgaaagacgccgagggctatcccaccaaatacccgtcggtcgtgcaactgcgatacgtgaacgaccccggctatgtgttcgcccagtgcacaccaattaacgaccacaaggcctatctggccgcccgcctggccgagctggccgacgaatgaggggaacccctgccatgcctttgattgaaagcaagcccctggccgagcaactgagccgagtccatgcggccaatgcccgctgtgacgcacttgttgaggcgtccagaggccagcatgtgacggacagcaataccgaacacaccgagcggatgcgcggcattgacgaagcccaagaggcgtaccacctagaattggtccgactgtccgccctggtgcaatcggccatcgagcgggccgaaggtatacggtagtcccaccggactttcacccaactatcggaaaggaacccacgcccgtgagcctgagctattcccctgaaaagacgcagattcgcgtcaatgccgccctggacatgatcgaggtggccgccgatccgctcaaggtgcgctttgccgtggcctacgccatcggctacgtcgacgccctggccgatgaacgcttgatcagcctcgacggcgccgaactgtatcgccaggacgcttacacgcggcgccgggtccggcttgcggcgtttggcgtaaccctcgaccacgacgaaccctaattactgaaaggaaccccgcgcccatggcaaagctgttgccgctgctgtctgagctgacccagtgcccgcactgcggcagcgatgaattttatgtccgctacacctacagcggcggcggcgtgtacgcgcgccgctatgacggcggcggtgactcggacaattcgggcatgtatgaccggttggtgatgaagccgggcaagcgcgctttttgtgtcgactgccagaagccggtggcccgttacgctggcgaactggagtgagcgccgcgcgttacgaataacgatttatatgttcaacctaacgattcacaaaaaccgccagagataaacgatatgtcaaagacccttttgcaaggcccgaagtttgaagccaaggactgtgcccactgcaccggtaccggcgttagagcaggggagggctgcccccgctgcaatggtgctggctcgtttctcaccaggcgcggccgtgctgcccgcgcgtatatgaacaccctgctggtgaagcctggcgccgaagccgcagtaggggatgtgatttggtttccggttgggtccgggaaggtggccaccgctgtgctgcgtgttgagcacggcgtcggcccgacggagcgcattcggctgcatggcctgcgccgtatgacgaacgaagaaatcgcgtttactgtcgccgcccacggcacggtggatctggcccacactccccaggagttggaagcggtgcgcgagaaggtagaggcgtaccagtcaagcctgaccaagacaggaagcgtttcacgccgccggcgcctgccatcatggtcgatgcgcgtggcgtagatgacgcaaagccgctaatgagtcaaagcgttttagtgctttagagtttgccctacggccattcgggccgaccgaacataaggcgtagggcatgagtgcagtattagcggtgcgtgatagtgacctggtaatgcgcgagctggcgcaaacgaaagcatccgtcattgaagctcaacgggtgctcatcgttggcgctggctcgatcccgaagctgcttggcgagctgaatgccagcctggcagacctcggttatgtgtgcgtgccgctggagcccgcgcaaggcctgtacaagacatttggcgacctgctggcgtgtccatcgctggcgccgttgttgcaagagcactctattgagcctgctgctgtagtccaacagcccgcagcacctcctgagttatcgctggagattgccggcgccggtgctgagcctgagcggcaccagccagcgcccgccccgccagacttgccggtggtggatgtctcgacgctcgacatgagcaaaccgatgaactggaaggccggggacgtgtttgtctccaatccccgtatcacgctcccccaccagcgtcgtaagtggctgctcgacttcctggacctatccgacctggataatctgaccggggtggacgtacaaatcagaagccccaacaccatcactactgagctgatgacgctcaagcagtttatggctcaatacgtctttctagagcgcccggccgccgagcaaagcgccgccgaataggccagtttagacccctcaaaatatgggcttgcataccactatgtaggcccgtacccatgccccttaatgcgattcaacaagcccggagcaccgcgaggcttttacagctgcacgcgccgctactgtcgggcgaactcacacccaccgaacgaatgcgggccacggccgagaccattgacctgcatgcggcgctgctcgacgccgttcctgttgaaaatccactaaacgctttagagctaatgcgttatagcgccgaattgctgaccgtgcgcgccaacctggaggccggcaagctcagcgctatcgagcaggtgcgagccagtgccagggggctggagttgcgcggcctgcttggcagttcaggccctgcccgtcggccgcaacgccggcgccaggcgtcaacagccaaggctgtgaccacgctgattactgaaaaggtgccgcagaagaacggcggccttctggttgtcgggaatgctgaggcgctggacagctacgcgcgggcctatctcgatcaagccaaatacaccgtggcgcctaccggcttgctgttgaccaaaagccaggcacgactggcagagcacctgccgaatacacaggaggctctgccgtccggggcggtgattttcagctatgccgatatcggcggcgtttctgtggccgttggcggtgagctgtcaggaatcgcgcgcgaccttcctgcactgaaaagccaaatggctcagcgatggggccccgaaaagtacctggccgtttttggtgagacggcggcgccggccgatgtacaggcctaccgggaagagcaagcgagcattacgcagcgcaaagcggacagcgccgccgcggagcttgaagccgctggcgccccgcagcgcgcgaaggacgaagccgaggcgctggccaaggccaaagcgatagagctggagcaggtccgcgccttagctgatcaagaaaaccgtgactatttcgcggccaccgccggcgccggcgtatcagacaaccctatctaccaggcttatctagacaccctggagcaactaccagattttcaaggtggacatgcagacttcttgggctgggcgaccgtgcgtgccggcgagtttgagcgccagagcaaaggccgtgtgtcatccgacagagaggggcacttggcatacgttcgccagtgggcggatgagcatctatcgcagcgtgtgaaggacgccagggcggcagctgagcctaaaccagaagcggcagcatccccccaacaccagatcattgagtacaccaccaaaaagcagaaggttttgcgcggggttctgcgcacagacctgagcctggctgacgcgaaggccatcgacccgtacacctggcgcatgaacggcggctatttcattcgtgaaaagtacttggagggggacaccagctctatccaggcggccccggcgccggtggtgctgtctccggagcaggaagcggaaaaggccgccagcgatgcccggcacgcagaagagcgtcgtgtatgggcgctgggtatccaggtcgagaagcttcgcacagtcgccaacaaggcggttgagagcggcgaagctggcatgaatcaggatcgcaacaccaacaccgccaggcgcgccgggatggccgccagtgcaatcgccaaggctgctgcgaaccacgcggacggtcggacgctcaacaatattgctgacgcaatcgaagccggtgccgcgggcctgctgaccaagctcaccagtcgcgtgcaactgggcgaaatacagcgcgccctgcgcctggcgcagtacgaaactgaccgagggctgagttacagcgcccagctgagccgaaaagggcgaccgttcgacgagaacgacctgaaaaacattgccatgcccagccaggtaacgtgggccagccgcttttcggatgcagcaaaggcaatcgagaagttaaagcccattggtaacgggcgtctgattgttgctttgaaaaagatgggcgcccgccctgagcggtttgccatgcgcgccgaggacgcggccattacccgcaaggcgaacgaagtgcttaagggcacccgagactcgcatgttctcgctgatccggtggaaagcattgcccgcctggaccggctcacccggatggggatcacggatgtagccacgctgcgtgaggcggcgcgtgagctgctgccgttcatggctgcaaaggccgaagagagcgcagtcaaaaaggctgagcgggcaatcattggccagaaggtgggaatcgactttttcccgacaccggcgcatgtggcccagcgcatggccagcttggcgcatatcagtgaaggggtgcgtgtacttgagccaagtgccggcaatggcaatctggcggacgcggcaaagtccgccggtggcgtggtggacgttatcgaaatttccagccaattaagggacatattgacggcgaagggatacacggtggtggaccacgattttgagggtttcacgcctgatcagccttaccaggccattttgatgaacccaccattttcgcagcgtcgggacgccgcccacatcatgcgggccttcggaatgctggcgtctggtggttacttggtagccattgcaggggagggcgtgtttttcggtaccgaccaaaaggccgtcgacttccgggcctggctggacactcacggcgccacggttgagccgctggaagagggcactttcaaagacaaggatctgctggcgcaaaccggcgcaaatgcccgattgatcgtgctcaagaagtaggccgcaaacccgcagaaaccatgcaaacccccgccaaaaacgggggtttttggcacttaacatcatttctgaaacgaatcgggcgcagcccaccatcatcagaaatgaggttacacatgcctacgaacacttacgcgcccgactccggtttgggtgaagttgccgcaaaagttggcgctctggttggtgccgcccgcggcagcaatggcaatatgctggatagcctcagcgctccggcagttgatgcggtaaaagaagctgttgccaacgccggcaagctgttgcccgctcgcatggctcggctgctggacaagatcgacggcgacgccaatcgcgctttcgctgttacctctctgctggacggcatcaccagctttgagcgcaagtgtggcttctccccgtccgccgacatgctcgacgccgttatctcccaggctgaaaacttggctgacggcaaaagcactcaggtgctgcctgacggcgccaccctggacagcatcagcaccaacaacgcatcggccaccctgtcccaccagccgaaccgtatcgccgtcgccatcactggcggcctgagcgaggccattccgttcggcgcttatctgccttcggacctcagctctaacgagtcgaagctggccatcatcacctccattactggctccaacttcggcgcttacaaggaaggtgacattatcgacggcacctctggtggccgcgaatacacccgctccgaacgtgttgtaagtgttgtggttaatgccgaccgcaccggtggcgccttcgctatcacgtcgcagattgctggcgctggcgtgactgtgccgttgctgcgtagccgtacctcggttgccgtgaacggtttcaccgttgcttacgagcaggcgaacaactccggtaccgatacctcgctgatttccgggcagttcaagcagcacggcgaatcctacgtcatcaacggcagcgtcaatgttaaaaccggcgccggcaccctgacgttcaacccggctctggcggccgatatcgacgtggaagttcaaggtttcatcgacttcgaggccaagcctgagctggcgccccgtatcggcaccattgcgcagagcttcagcctgtattgcgcgccgtcccgcctgatcatgcaggccaccccggattcgcgcagccagtcccaatcggaattgggcgcggaccgtctgaccatcgctgtacaggccgcccgcacccagctggcgaacgagcgctacattgctgccctgcgtaaggtccgcaagctggccaagaacaccagtcgcacctacgacttcaacgcagccgagcagctgacactcaaaacccgttcggacgccctgcgcgacctgggttcgttcatcgcggctgtcgaccaggacgttgctaaccagaccatggaattcggtctgagcttcttctacgtcggcgccatcggtatgtcccagttcctggccatggaaagcggcgccgactttgttccgtcgggcctgccttcgaagcctggcatctggcgtgtgggccgctacaagaacaaatacgacgtttactacagcccgtacgtcgtcgaagaaaccgacaccgatatcgagattctgtgcatcggtcgctccccgcaagtggcgcgtaacccgattgtcttctcggacgcggtatcgccgaccctgatcccgctggcggtcaatgccgacctgaaaaccggcgctgcgctgttctcccgtcagttgaccgaagtaaacccacaccgccagtcggcactgggctgcgcactgatcaccatcaaaaacgtgtacgcactgggctaactgggggctgtcatggctgcgaaaactggagttaaaccagcggctaaacccgctggcgcaaaacccgcagcggccaccaaggcaccgggggctgtggagaaatccgcagccccaccgggctctggcgggtctgctggaaatagtgagagtgaggctgacaaggctgctctcgaacagcttttcagtgacctggtggatgaagctgaacgcatgaaccgggagtgggatgaaaacgccgctcaggtgctcgctgggcatatggccttgctggaagacgaggcgcgggcgatggactcggaattcaacgagcttgttctgctggaaagcgaggcctgggccatggatgcggccctcactgagagcctgaaaaccacgcaaaccactgccgaaaccaccccggacagtgccgtaacgttgccggtgtgggcgcttcccgaaattggcgagttcccggccactgtcatcctcgaaaaccatacccgaaaccgcgtcggcgtacctggcgctcatgtcgctctggacccgtacgagagcgtcgaggtcacggtttccctggagcagttcgccaagctcgccaagtcgctgaccagcagcgcgcgggcacacaagtgggacaacctcaaaggcttacaggtgaaatatgaccgtaaagattgatcgaaacgcaggaaaagcgccccacgccctcgttgacgcgttggttggcgccctgagctttcccctcctggtggtgctcaagcacaagaacgacaaaccgttggtgattccttcctcgggcatcaacacccctattgagccaggcatcgccacgacggtgaaggtgaagagccgtgaccaggcttggatgctggttagcgatatttccgaattcgccagccgtgcaggtaacgattccgacgattttgccgttttggagccgctgccggtcgaaggcattcccgagaaatccccccagctgtcccaggaggcccaggccgacgcggcaccagctgatccagccagtggcggcgttaagcctgtcaaaatcaaggaggtcaaataatgtccattcctttttctcgtaccattgataagcgttcgggcgtacagctcaaccaaatcaatgacatgtcggaaaccccaagcaccagcaccgtagcgcacaacatggccattaccggccgttttgctcgcggtcgcatcgacaaggtttttgcggtttcgcgcaacaagctcaagcgcaccctgggggccgcgcagtccatgtcggtcagtgcactgggtgagccctacgtgcacatccaggaagcgctcaagtccggtaccgtacaggctatcgtttctcgcctggtgagcgcagaagccaccaacaagctcatggtggcgtccgtaccagctcctgcacctgagggcgccgcgcccgcaccggtttggactctggtaaccgaagctgccggccctaccggtgaatatctggtagctatcaagcacctggaatgtttctccgaaggcgtcagggctgaaatccacgcagacgccgccgttggcgcagacggcaagcctgcggcgtccaaaatcatcgtcttgcaattgcgtgacgtgaacaccaatgaaatcgtactcggcccttacaagggctcgcttgatccggcggcgcgcgacgagttcgacaagagctttttcatcggcgatatcgtggcgcaattcaccgaccttctggaagtggtcgaggtgaacactgacgctgccgtgcctgtgacttgtgcgttctacggtaaaaaagacaataaagacgcatacgcttcggctgtcttggtcccattcaccgaaggctccaagctttacaccacgtctgaccttgacgcggccgtcgaccgtatccgtcgctcccgtccgacctttacctacatcggtagcggcggtaccgagagcgtggcgctgatttcccggctgctggagctcggcaaagaaatcaacaagcaagtcccgtgggatgtgcctggtcgtttcactcccgcagctgccacgacgttttatgaatctgttggcggggctgccgacagcatttacagccagtgctactgggcgcctatcagcgccacgaacccggcggcgggcggtaaggcctttatcggtacctcgggactgaatatcggcttgcgttgtgcacgtaacgctcagaccaacgccaagggtattgctccgcgcaacgtagtgatcgccggcagtgatttttctgtcagccgcacgaacatggttcagacctacgagccatccgatgacgagctggagctgctggcggcttcgcgtatcaacccggtgctgttcaaggattaccagagcggcggcaaatatgcctggatcgactccctcaccggtgcgcagaccgaaggcgccaccaagcttattgcggtggtggaaatggctacttatgtcgacgacaccctggcatccgccgctcaggaagcgctgcaaaagcccatggccaaggccatcgagaaaaccaccaagtttgctggcaatttcctggagtcgctgcaatcggcaggttggttgcagccaagcgctgagctcgatggcgcctgttactcggccaccatccaggcgaatgcaaatcagccattcgaaaaaatgaacatcgacacgtccatctgctacgacggtacggctcgtatcatcgttcagcagcagtccgtcgtccgcacgtaaggggatcaacaatggataagttactgcaacacgtactcaacaccagcgccgcggtaagcctggcctacgcgccaaaggctgccgaagttcctaaaacgccagacttgccgcttgatccactggtggcggcaatgcttgacgcggtgaagcccgaaaatgccccggccgctctctacaccgaagaaatgcgccaggatgcggtgaacattgttcaagaatgggcagagtctgacctggaagcgggcgaaggctttggcgaccgtctgtatgcgctgattgtcggtagtgctaccgatggtgatgacgacctgactgatgatgaagccgactatgccgctgccgtggccgagctggtgggcgattatctggaagggaagggcatcgaagctgctgacgtggattcgctgctgggcgatgatccatcgtttgacaacgatgtggccgctcgtattcatgatgccttgctggataagctcccgcagggtgatgacgccatgctcgacgatgctgacaagttcgtcagcggtgatgacgatcaaatgctcgatgcggtttacaagaaggtcgtggccattcgcggcggcctgaaagttcgcatcaaaaagcgtgtcagcggccgcgtccgcctgacggccgcacagaaaggcgccatccgtaaaatgcacaaaaaagcattctcgggtgcggcgaagatgaagcgcgcgaagtccatgcgcctgcgtcaacgcctgctgggcaagtaaaacatggccgactttagcgttgacagtcttggcaaaaccgtttcgggcgccatccagggcgcaacagcgccggctgccgggagcacgtcaaacaccttgctagggtcggccaccaaattcgtggggagcggcgccgctggcgcggcttccgggatcttgaaagcgggcgtttcgacctttgacggcatggtcggcggcaaggccaaccgccaggcgttggagggcgcggcaaatacagtgacgggcaccgtctctgacctatggtcgggaaagacgaccgtgggggctgtatacgactcggcgtctgcaaaggtcatgggcttggtggaaggggcaaagaccgccgacccatctgcactggtgggcaacatcacgggcagcattggcgagtatttgccaggcctcaaaacgttgagctccgacctggggggcgactggggcagattgtcgcctctgttgctggtgcgcctgtttgtctgcaatgccaaaggcgtggccgacatcaaggaattcaccggcgtttacgcggcgatgaaagaaggctcattcgaagcccagcaaaattgggtttcgccttttgagagcactgggccggaaaccaaggctcctgcactggccggcatgcttcaatctggctcattggtgccggtcctgaacgcgctacaggctatttcaccgtttaaggatggcgcgatagcggacacgctcaattcaggctctgacaagctcaagagcatcatgcgtgatcttgaggggcgcaccggtatcacaaagctgaattcacgccaggtgttttcgggcatgccaccagtgaaggttaacttcactttgcacttccgggcggtcaaagacgcattgaccgaggttgaagcgccattgacgcgcctgcttgagtgggtgtttccacaagagctggccgaagacggcattttgtctgaggtgctgaaaaccaccaacgatatcgagtcgtttattcaggccctctttccatcgaccgctcccaagctgctgggcttcacatacgccggccgtacttggtcacccatggtgattgagagcgtgacgtttcccctggatgcgccaaaaacgtcgcaaggctatttctccgacctgccagtgcaaatttccatggccacgctcacggcgctcgaccgccctgacatcaagcgtttctttggtcgataactcgtcgaaaaccttgcaaaccccgcccgttcgcggggttttttgcgtgtgacgattgcccggagtgatcaattctcaagaggtgacgtatgacagttagcagcatggcggttttgagccgcacgtttcaaaacaccaatgatatcggcgccaaggctgtccaggcggacgcctgcctggtgatcgatgaattcccggacatgatgctgctgttcaagcagttcccttggccagtagctactgcgggcgctgtgattgagtacttcgggccgctgggtcaaaagatgggccagccatcccagaacaaaaccatgcaggaaggcccggtctcgatctatgaaacccgcctcaaccatgccggtgagttcctgaaacagctgattgcaatcggcggtgagttcaacggtaccgtctacgcgggtcgccctgacgactacacccgcaaagaagatttgaagaagtgcatgctgattatcgacactcctgatcgtgactgggagaacgatacgcaggttctgatgctctccggcaccatgaccttccactggtttcagaaccaataaccatgaagctcagccaattagttgagcagtaccttgctgatctgccgattggctgcgtgcttaccgaagagcaaatagcccgcagcctgcgcaacgcaacaaggcagtactgcggctatgcactgctggccagcgccgaatcactcgatgtcgtcggcgccgcacctggtggtgtcgacgttgatttgtcagacagtgagctggggattatccagccgctgtggacgctgtacctggagaaagaaaacgcgcttgccctggaggcatcgaaaagccagggcgcggagctgtttgggcgcagtgtgtcagaggtcgtgccgtcgatcctggagtatgagctttcgctgcctcggctggcgttttcctacgccgtaaggtcgatctgatgggcaacatctttgagcgcttggcttaccagggattaagtgccgtggcgcctaagtctggtctgagcgggaaggtgctcaagtacagcaacgccgccaggaacttgctcggcggtaacttgagcggcgccgccaacggcctgatggataacgttttcgggcgctccagtgtcttctccgaaggcggcaacatcattctggccggccaaagctggcaaagccaacttgagatgttcgaagaggcatcgagcgtcttgcgtgagcgtacgaacctttggcacgtcggcgtagatccggtgggaaaagtgtcggcgccccgggtcaatctgctggccacagaggtttctttcaacagcatgcagcttgggtatgagccggtaaaaatcggttctggcttcactcaagcgcccacgggcgccgacccgacggaattgcgcctggtttgctacgacgttagcggtgaaatcaaaacttggtttgaacagttgttcaccctggccgcgcatccggatggcactttcgggcttcccaccgactacgccaacacgatcactgtcacccatggcgcggtcgaggaaggtcgtggctactccaagtcctgggtgctgctgccggtctcgtgcgaagtcaacctttcgcgcagtacggacgatttcacggcccttaatctgtcattcacccaatacgacaccttggggactttatgaagtacatcaatccaataaacacgcgtcgtatctccgttgagatgtccgaaatggccatcgaagacgtggaaaagctctgtgaaatcccttctgtttatgaccagcgcacggtgagcgaactattgcgcaggatctgcaaaccgattgatcggcccaacgccgtatctgacccgcgtttctggtccatcaacgagcgtatctacgtggtggccagctacatggcagccacgcgcgatgacggccccgacttcccggtaggtgcaagcgatagcagtggccattttagtgactatctgctgtctgacactgattacgtggccgatatcccgttcacttacggtggcgactcgctgttgttcagtccgctcctgggctatcaggccgagattatcgaagcgctgatcgccggcggcacctacaaggcgaccgactacagctggtggtgtgccgcgatggctgcgtgcgtgcgtgacgctggtgaagagcccataccgtataccgacgacgcgagctacgaggctgagctggtaaagcgaattgccacggtccgcagcatgccggagtccacgtttgtcgggcttttccaggcctaccttggcgccacgatggcgggcgcgcacctggtgcacgcaatcaccagctcctacggcgtgattgcttccccgatcactgagccaaaagagggggagccagagttagcacctgcccgatttcctgcccattcctgcatcagcttcggcgcgcgtcaagttatgggattcgtataactccgtcagggctgagctggcgctgtacttcggccaagacctgacgcagtgcggaaagatgacggaaaccagaattcgggcgctgttcgacagcaagccttttagcaactggaaggcctcccgagaaaacgaaaacaaaggggtccaggcaaccatcaatcgcctggatgcggtcattaaatcactgggcaacgtggcgcagatcatcgccaaaaaaggcgtgtgaatgacgcaaaccagccgccggcggctggcacaaagccatagacaatatcggtaattaaccatgaccagatggaataacgatatggccgctgacgtgcagcgaatcatggacacaccgctcgccaagctcagcctcggaattgcccaggcgggggccgtagcgctgcttatcggcgtatgcagcagcatcaccacgaagctcgacaacatccagaacactgttaaccaaagctcgcgggacatggctctggttcagaacgatgtgcggcgcctggagacatcgaccagcgagctgcgagctgagcagtcgtccggcgaaaagcgcacctctcgcctggagttcaaggttgaacagatggaaaaggaccgggccaatgaccgcagcaaataaggcgccagtgccggcgacgttcaaggatttgctgcgccagaagttgaagccgcacaacaaaaccatttttgccatttgcctggtgctcgatgccttggtggcgctcatgacgctgtacagcgattcgccgccgttcgacgcaattatttatggcgctctatcggcattcgtgaaggcggccaacgtagggcttcattacctcagcaagacgattcagggagacgattctgatgcagaacaacaacagtaaggcgccggccgccagcgcggccgatatcgacattctggcccgaaccttgtggggcgaggctcgcggcgagagtcaggcaggccaggaagccgtggcatggactatccgcaaccgggtattcgatgggaaaaccaattcatggtggggtgaaggctacgcgggcgtgtgccagaagccgtggcagttcagttgctggaacgccaacgatccgaactcgccttatttgcgcggcgccaagcctatcccggccggtgagtacaagaaggcggtggccgctgctacggccgtagtgaatggcgcaattcctgacccaaccaatggcgctacccactactacgccaccaccatgcccaagccgccgacctggatcaaaggcgcaacccaaacgctcaagctgggccggcacatcttcttcaagaacgtcccatgaacttagcctttcagctgcttgcaggcgtattgctgctgatgcttggtgccgagggaggccgctggcttgccaccaaccagtaccagccaaagctcgatgccgccggtgtcgagctgggcaaagtcacatcttcacgcgacaacctgctggcgctcactaccgagcaggggttgaagttgggcgaattggtgcaattggggaaagagcgtgaactggcagctgacaaggcccaaagcaacgcccaggtagaagcaaactcccaatacgcggccgcgaatgagctcatgagagggcgtacgggcggcgaccagtgcgcggcggccgaggcgctgatagacctggagttattcgggaaatgaaaaatctgatcattttcgcgacattattggttcttgctgggtgtgccgataagccgcctcatctggtccccgctatccgcgtacccgtacccgtccccgtcccgtgtagaacgaaaagtgtggaggtgccagcgtttgccgctgagggtatgaagaaatcagaccctcttgaggtaaaagtgcgcgccctgctggccgagcgccggcagcggatggggtacgaaatcaagctgctggcggcgaacgcggcctgtcaatgagatatggcgtcaaagccctttagagtcaaagagctaaagcgtcaaaacgccaaagcgctaaaaaaggaaaggggagcattacgctccccgctccttttttaggcgtgggcgctcattgggtaatgagcgcccgagtgcttttcgatgcgggccggtggagcgctgcgctccatcacgtactttgcccagcggtccatcattggcctgcggcgttccaatagattgccccggttgtaagcccgcgtggtggcattgccgacggcatgcgacagggcaacctcacaaaggtcggacggaaatttggttttctcgttgacccaggatgtgaacgtggtgcggaagccgtgtggcgtgctcgtttcgccgtacttgatcagaacacgacgcatggcgttgttcggcatgatcgcttcaagtgtgcggttgggaaaaatgaacttgctcttgccgcgggtgtgcacgtccttgagcacagccatagccgcgtcactcagcgggatctggtgaattttgcggtttttcatccgcaccgctggaatgttccatgtcttggtttcgaagtcgatttcatcccactcggcgcccatcgcttccccgctccggcaagctgtcaatattacgaattgaaggcagcgggcagcgcgggttacatcgccctcaagtttttccataaagccaggtaaacgagagtagggcattgactccaggtgaacagtctcaggtacagcgcgagacaggatgttttgcaggtggccacgccaccgggctgggttctcgccctcacgattaccgcgggttttggcgaagtccagaatcagctctatgcggttgcggacgcggcgagcggattctggcaattcttgccaaattgggtcgagcacggacaccacagcatcagtatccacttcgcccacgggcatgtgcccaataatcgggaaaacatgatcacgcagtgagctgtgccactgagcagcgtgtttttctgaccagccatgtttgtaacgctcgatgcgttcaagcgcttcatcttgaaaagtaagggtttttttgacttcctggtgcttctcagccaacgggtcgatcccgttgttaatttgcacccgcagttcaaggcatgcggcgcgagcatcggccaacgacacgagtgggaattttcccaggcccgcgtcgtggcgtttgccgtttatctggtaccgaaagatccagaattttgcaccgctcggggtcactcgcaggaataagccatgcttatcctggtaagaggccgggatggtgatgttttggatagccttctgcgtgagagccattttggttttaccttttatgcgcgatttgtaaggtgcagcgttctgatatccatttcgtgagtgaagaacagtgtgtgcagctagacagttttggattttgccggggaatccgacacgtaacctttcagatagtgccgaaagtacgagggatatagtatccccgatcagacgcctggaaacccccggaagggctggcctctggcgtaagtggggtgaggtgttcccacactttgccccacactaaaccgtagaaggttcgcggggcgcggcgcgggtatattttaggagggggaatacgatccgacgagcggtatgtttaaaacggggttttttttgctttggtcgcgtttaagtagttcaaatatcggtcattgccgccgaaaaggtcaatcattcgggccgcgtgctgacgttctgccatcatttgccgttcaaatcggtcggcttgctgtttggcctgattttgtgacatgcgcgtgagcccttggccaacgtccaccggcagctggtagccaaccgtcatgctcagcgccaggatgacggtaaggagcgctattctcaggcgcttggccagcgcctgccccgcgacagtcacctgtttcaaagggtgcagcgctgagtagacgtacatcaggccgatggccaatacgagtatggcaattgatggcattcgtttatcccttaaattcgaactgaatgagccagcaccacgggttgctctccgctggggtgctggggtggttgcgtgcccaatatttgtgaaagtcggccttgctggcatacccgcaggcctgccagtcgtgctgaccaaggttggtaaagcgcgcgatgtccaagcgtctcacgcgcccggtaccgaacctggcgtgcctttgcgggggaagctcttgcagcaagtcgaaggcgtttccttgctgaatgggggcgatatcgcggccgatgactccagccctgaaagccatacgtactgcgcccatgagccctattgcgtcatccacgttcaagccacatgaggccagggctttggcgtcaatcaccggctgtggcgtgaagggcacaaccacctggcgcaccgtgccgctctgcaccttggcgctgatttcaggggaaaaggccatttgtttgagagcaaagtcgggattgccatcgttggcacgtcggagataaccggttacgtcgctcatagagggtttcccccggtggggtttcggtggtgcatgttggggccccggctcatcggctcatgaggttgaaggtgactttcttgatggcgtggccatgctcttcaacgagcttcgcgccgagcgtgtctatgaggttgagcgccgcctctcgggcttctgcgtagttcatggggccgccgctgttcacgttccatgtggattcaagggcgttgcctctgctgtccaccaccaggaacttgccggaccagcgcacgggttttcggggttgcttaccaaacaccgagctgcatcggccgttgaaattgactttcaccccgcaagctcccaccaggtggaaaataagacgaacagcttcgatttcatggggttatcccttgcataattggccgccctgagtagaatccgggcgacttatctctggcgatttaagtgggaagaaaccgcgcagccccttgggcacgcggttttttttcgtccgcgattcggcttagatcccttgcggggcttcctcaccgcccagcgcctcaacgagcgccggcaggaactcaccgaacgtcagcatcatcaaggtaaagctggcgtcgagctggcccagcgcatcgtcgccaccatcctgttccgcttggtcttgcagcaagtcctcgaatttcaggcgtttgatagtcatcttgtcgtcgagcatgaatgacaacttgtcctgccaggccagggacatttgggtaacgactttgccagtggtcaggtgcagttggatttcttcaccggtcaggtcttggcgcttgcagcgcacaatgccgccgtcttcatgggtatcgcgcaactcgcactcgtcgagcacaaagaatccgtcagctggttttttcgtggttgcccagtcagtcatggtggccaccggagcgatttttgaggtcagcggtcgcaccggtagcgtgccaatcacttcacgcagggtagagagcaagtcctcggcacgctttgggcttgccgaattgaccaggatcaggccttgtttcggcgcgatggcggcgaaggtcgaagagcggcggatgaatgctcgcggcaggaaggcctggatgatttcatccttgatctggtcgcgctcctttttgtagaccttgcgcatttgctcggtctcaatttcttcgaccttctctttcaccgcgtcacgcaccacgctacccggcaggatgcgttcttccttgcgcgcggcgatcagcaggaagtcaccgctgacgtgaaccaggggagcgtcttcacctttaccaacaggggcgacgaaaccgtaagtggtcaactcctggcttgcacaagggcgcgccagcttggtggccatggccgtttccagcgcctcagcgccaacaggcaagtcttgggtcaggcgatagatgagcaaattcttgaaaaacatggtgtgtccttagaagggtagggcagtgccgggcctggcggcccgagaggtcaggcgccttgcaggtacggagctggcgcaaaggggatgtcgtcgtccatcgggtttgcatctcggccgggcacaccctgctgaccacgcgcgctctgttgaggccggtgttggcccgccgtgcgtgggtccgccgcccgttgctgtggttgttgctgatcaccctgggggcgcccgcccagcagctgcatggtgccttgcatatccacgacgatttctgtggtgtatcgcttgatgccgtctttctcccactcgcgggtttgcagcttgccctcgatatagacctgggagcctttgcgcaggtattcgccggcaatttctgcaaccttcccgaacatagacacgcggtgccattcggttttctcgaccttctggccggtttgtttgtccgtccactgctcgctggtggccagactgaggttggttactgcgttgccattgggcaaatagcgggtttctggatcttggccacatgtgccgaccaagatcactttattgactccacgagccatgtctggcctctccttaactatccctatacatcatttgggcgcaaaacccgtgttcggcacatacgataaagcgttccgataatttaaaacagcgcttttatgtctgcatggtttagtatctgttcaatatcgactgaactggggctgtacggacaatgaatctggaagtgtttgagggggcgacgacggtggaagaggccgtcgaagccagttacatggagcgccggcgccggttttacctgtacgtcgacctaaaggccgacggcgttcgccttgacctatttcggcatctgccggaaaaggagcttcataccctgtcaaaccaggtgagtgtggcctgtaaggcgcgaaccgggatcaccgaaaagctcgccaggcgcctggaatacgtgattgggattcccttcgggtatttcgaccagcctctaccggagcgtgagctgcgcgcatcaatggcccgcggtgcacgcctggtgcgcaagcttcaaaaatacgacttagatcctgagtggtccgggcgtagcaaaaacaaaattgcccaggttatggattctccaagcggtcagcgtggagtatcgaaggccctgtatttgcaggtgattgcggcgttacgtccgaagaaaaacggttaggaagggaatgtatagggatcgcggaatgttagacgaccgcgtttcagctatggtatacagcacgccgatttgaggcagattgcctgcatgcacaaataggagacgaaaaaaaagaacccgcccccgccaaggttataggttcttttcgacgtaccaaatgataaagcaccacaaccatcaacccttaagctttccttgcttgccttgtgctatccgaagatggcgccgagggggtatgtcttgttggtagcccgagtatatcacagcctcgggatatacaaactttcccgcctttttcaagaatccagactcagtgtttcgctgaaccggccgccaggctgtgactgtcagcacctgttttggttcctgttttttgccgtcagcatccgactttcagggggtgctcgatgagcatcattcgcgccgcacgaaaagcccagttctacaacctgcccaccaccatcgtcgatgacgacaggctttcttgggaggcccgtggtctgctggtttacttgctgagtaagccggacaaatggacggtacaggtccgcgatctgatcaaccgcaccaagaatgccataggcaagtcggctggcaaggacaaggtttacagcatcatcaatgagctgcgcgccgcgggttacatctaccgtgaattcaagcgtgaaggcggtagctttgtgggcgttgactacgaagtgtcggaaacccctgatttagacgcggccgccgagtacttgcggtccctagagtcaaagtccaacacaccgtttccggattcggcggaaacggtaggacaggcaccaccatttccggatttcacggaaacggcggcaccggttacggcaaagcccgaaacattagatagtactgaaagtacatctagcattgaaaaagcagtaaaacctatcgcctccccccagggcgcagaagctggggcgcaatcgccggccgattcgaccgttccgcccgactaccccaacgattacccagggacaggcagcacaatttttgctgcctggcgcgcctatgctctcgccttccattcccgttacaagcaatggcctttctacaactccaccgtaggcggaatgatgggcaaggctgtcgcccgtatccatgacgccaccccggccgctgtaactcactacgtcaagaacgagagcggcgcccacctcacggacaagctgcaccctgtccctgtgtttttgaagaactgcgaaagctacgccagcaaggctgtgctggctgaacaaagcaaaaagcgggcggacaaggcagcggcggccgtgagagaagcggaacagtcccccgccatagcgccccaggcaaacgaacccagcaaaaacacaccgtcgccagcatctgccggcgccgcggccctgagcgagcttaaacaccgcgtgggcataccgagcaagtgaagcacctgtaattccaagtactcaatcgccagagagaaaacatcatgcgccattcaggcaaaaacccaaccaaggcccaagaccagtggttcaacgacgtagccgatatctgcgggtgcatctgttgcatgttggacggtcacccgcgggatttttcagagcaggcccacgtttcgatccatcactgcgacggccgtaccaaggcacatgcgcattactacgtgctgccactgtgcgctggccaccaccagcaaggctacggccctcgcccggatatgttggccgtccatggcaacaaggcccgattcattcaggaatatgcgcgggaaatcgagctggtagaaatgtgcgtccagatggttgagacatccggccgcgttgtgccgcctggtgtctatgcgctgctgggcaagtggcgggaaagcaaacaatacagcgaggaagcggcttgatgagtgccgaagaagaaacccccaaggtgagtaccaaggcttgcgcctgtggcagcaccaaccttatcacgctggaatcactcaatagcaagcactgcgcagagtgtggcgcggatattgattggccactggagaaaggccagaaaagtctcaatggctgccatcgttccggccgcaaccccgcgccgacacaggctttgggggctccacgcgaataacttttgacctcatgttgtacggggatacgaaactatccccgtactcaaatcataagttttattcaaaaaacgctttataaaattcagggctgagtgatacgctttgttctctacaaaacgccagagataaagctatgccaacccttccaatcatgtttagccggatgtcggcggaccttttagcgcatcgcatgcgtttcttgggctgtccggaaattctgaccggcttgtacgagataaatcccccgccaggtttcgacgttgagcactgggccgatactgcccgcggcctgaccgaggatcttcgcgacggtcgggcgatcaaccctgatcccgcgtctatcgcccttctggtcgaagcactggagggcaatagcgttataggttcggccccaatcgaaaggcgcgcggggctaatttcagttgcggcaatgattgcccagcgcttggagccctacgcggggcgcccaattaaaccggaggttcactgaatgaccgtagtagccaaaatcaaagcatcttccgcgaagcctgattgggttggcgcgatgttgggtaacccccgttttgagttcactgcgcgtttgtgcaccgacagtgacaagctgcgactgatcgccaagcacctgccgacctgcaccacggttgagcttgatgtgtgtggccatggcaacgctgatatgggcgtttcccgcgtcgagctttgtgaaaagctcgttgccgaaatgcttgaaacgggcatggtcgagtacggttcaagcaaatttgcccggctgttgcgctgtgagtacgccaatcgcttgattgaggtcatttccagttacgggcggtgctacttctactcccgcaagcgtgacagcgtggcccgcctgagctttgaccagcgtgtttacctccacgatgagagcggcgcgacgattgaggccaaagccaccagtaagtgggaagggttcagccacaacgggactttgcgtgacttggtgctgcaaatgcgcaattacgtcatgcgcggcgagcgaatcgaccccgcatacattgggatcgacagcccacggggccaaggcaacatttgggggtattcgccggagcaaatgcgtctgtgccggcaggccgcccagcagctgcccatcatcaacgtagcatcgcccatggagtgcgcggcatgagcctgtatccggggcccattgtcttggggcatatccgtgtgaaatcgatctgtgatgagtgcggccgcgcccgcagcagcggcaaccatcagaagtgcagcaagaaacgccaagtacgcactgcttcgctggcgcccaagcaatgagcgcctttgaccaggatcaaatcgaagcggccgagcttcaaagctggcttgtaggcaacgcccgctccatccgccctgtcgcccgagttgggcttatggggtgggcgttggcagcgctcaaggcaaacccggctgtgggcgagttgcaccttctggaagaggtgtgtgctttctacgctaacgacgaagacacgttcaatcgcgaaggcggtgagccattcagctcaatccctgtcgaggtaggcatgaaggcccgacaggctcgcgagcggtttattgagcgtgaggcccgtaccgaggccaccaacaccagcggccaggctcattgcccgcactgcgccgtttgtcatacgagcgaggaaacgtgcgctaaggcgttagagcgctttaacgcatcagcgtttaatggcttcccgtcggccacaatttcccaggaaagcatccatgaataatcaaatgatcggcggcctgtcccgggacacgctgacaaccgccctgcgcgcgatgacagacgcccgcgaaacgttggccaacggagccgcccgagagcgctaccggtcggctattgctgacattgaggggcttttgaaaagtcctgatgatgctgcccctgtttgggcagaggtgctgttaccgctggaggtcgtgcgcgaagcgctcaccagcaacgacagtgctgagcggctggcgaatatggatgccagcaaaaccatgcgtcaagcaatcgacggcctgaaagcaatacgcgacagccttcaccagggcgctcccgcgaaactctattttccgacgatgctccgcaaaatgtggtcaggcggcgatgttcagcgttggatcgaagagcagggaccgctctaccgcaagccgctggtgactgagggcgctacagccacccttcaaggcgtttatgagctgctaggcattggtgagttcgcgcgaacccctggcaccctcatggcgaatctggaaaacatgcagcgctttgcaggctacctttcggccatagagcgtgagtttttcatggtgccaggcgagcccggtgacgagccaggagacgaaggcctggagccagccgacacgtgcctgctgaactgttggggcgctgattccgcgcagcactacgtcgagcagttccgcactgcgctgctgttgatttccaaaccagcgggtgaacctgcggcctatatccagttcggcgaggctgattcgggcgaaataggcaattacgagattgagccaaaccgtaaggtctgtgaggccttgaacatcgctgataacggcaatggcacgacctacgacttgtacatgttcccgacccaggaggccggcaaacaatgaaagcgctttcaattcgccagccgtgggcatggctgatcatccatggcggtaaggacatcgaaaatcgcagttggcataccaaattccgcggccgcttcctggtgcacgcatccaaggggatgacgcgggacgagtatgccgagggctacagcttcgctctggagtgtggcgttactgacctgccgcgctttgacgaattgcagcggggcggcgttattggctccgtagagctggtggatagtgtcgacgccagcccttcgccttggtacatggggcagaaagcctttgtgttgcgcaaccctcaacatcttccgttcacgccattgcggggccagctgtcgttcttcgacgtagcagacgaccgcctgacattggccaaggcagtatcaagccaatgacagatatcgaccctgttgagcttgagcgcgctattcgcaagatcaagcattgcctggcgctctcagcgagcgccaacgagcacgaggccgccgcggcgatgcgccaggcgcaaaagctcatggcaaagtaccgcctgacagagacacaggtaaatttgagtgacgtgggcatggccagcggcgaaggcgcaaaagccaagcgcgatgcctgggagtcatatttggccgctgtggttggcgaggtattcgattgcgaggcgctgactcatgtggcgtggtgcaacaaggctctatgccggctggagcgctccgtattcgtcggggtagctcctgcgccggaaatcgctaaatacgcctatgacacgctccacaggcagtgcatgagcgcccgaaaggattacgtgggcaaaatcaatcggggcgaggtgcccaaaaccggcgcaacccccaaaacccgcggcaatcacttcgccctgtattgggttggccaggtgaaagccaaaatagaggcgctggtgccagttggtgatgacttgcaggattgcagcgaaagcgaatcgcgcgctttggtagcgatcaagggcaaaaatcaggaactgatagatgcctacttggacggcctcacaaaaggcaagggcccggcacctggaccaaaccggcgcaagatcaaggccagcaaggtcgatgctatgtcgggtatcgtggccggccgcaatgctcgcgtaagtcacggtgttggcacaacaggtgagcagctggccgccattgggcaggccccaatgggcacccaagggagttttctgtgagcgagttcgtactgcaagactcccggagtaacacgggcgatcgcctgatgttttgggcgcaaaacggttcgggctatacgacgaatctggatcaggcccagcgctacacccgcgaccaggccgccaggcagaacgaatgccgggaaactgatctgccttggcccgtcgactatctgctggcgcgccacacggcagccgtggactgtcagaacgtcaagcctgacgaaatcgaagtggcgttgccggccgccgaccaaacctacctgtatgtcgctggcgcctggaatggtaatgatctgatttggctgacgccggatggccgtcatagcgacaacctcggcgatgccaaggtgtacgacgctagtgttggggtgtcagtcggcacatacagccgccagggcgtgagagccatccccaaggcaattgcagaccagctggcgcgcaaagtggtggccagcaccaaggtgaagcacaaagaagccttgcgcggcacaggcattatcctggccaagcctcgaaagttcatgttctcgcgcgaccggtgcgaccactgcggggtgtttatctccgacgcccaacgcttccaggactgcccgaagtgtggtggcagcaacgccccctgagggcacaagccatagctgtatcccgaacggcagagcgccaaaacgctttgccgtttttgtttgaggcgccggcgctgcacggacgctaacacgcttagcggtaacgcgttaaaacgtcataacgttaatgacacattagcgtttttatgtaattatgcggttgcagttaagccagagataaggaacccctatgaactattaccagaagccgccggccggccaggagagcgaaattggctgattacctgctgattacccgccaactgctggacggtctttgtgccgacctggagcaggccgccccgggcatgcccagcttgaagtcagacgctggtgcgcgccgaaacgtgctgcgccttatcctggccggcgaacagtccgagcatgcacgccctattcccaccaccagtgaagagctggcaaagcaggcgcaggaaacgaaagaacgcctgcgtacggctgagcgcttattgcgtcgttgccagccgctggtggttgagggtggcgggaaatatgttgtcgtcgggtctgtgactgacgccattgagcgtttcctcaaaggtgcaccggtggagagcagcgtatgagcgaccaaaccggcccagtccgctatgacctaatgttcagcatgtccgaagccagtcatgcacgcgtcaaccagctgctacaccagtgtggccacaataacgtcaacctattgcttgctcgtgggttggcgttggttcaatgggttgaggaacaacaagacctcggccgcaccatcggcgccgtgctgtatgacggtgaggctgtcgatgtgtcggaattgacggagcggcctgagcttttgaagccgcagccccgccctcagtctatccctgtcaaacccgtggcggctgttgccgaggtccagccttcaacgccgccggcgccgttggccagtgatgatgcccccgtgaatccaaagctggtgccgcgcgcgaagaatcccccgccggttaagcagcctcgggcccgcgctccgaatggccgcgaacaacagctgcgcgcccacatcccgaacaacgatggtccggtgaagacctacacctgggtgcgctggaagtgtgaaatggagaagcgaaagccgccgatcctgattggcgatgaccgtgcgctaccgggggaactgagtcaggaccacctgccagagttggagcgcatgctggttgatgccaagcacgccacgcacttcctggtgacagttgacggttttctagcctactacggctaccagcctggcaatggctcgcggggcggctggcgctacgtcgaagagggttctatgcaactgcgcaaagatgcgcactgcgatgccggtctcttcgcgattttcccggtagtaatggctgtggactacctacgccgccaggccgcacctgcccgaacgttggccagcgtatgagtgcggtgaaagcgtttccatgggcaatcaatggtttgaactttcgcacgcgggccgagctggagagagtcgtcgaggcttttgccggagccggtacccgcgagcatctatcggcggcgaaagagctgatgcgcgcagcgatcaaccaaaacaagttgagtgctgaccagcacgccgaaataaaagagaggctgaacctatgagcaatgtgaagcgttacagcgtcgagcgacctggtatgcagttgcacctgccaggccaccggctggggaccgaagagtgccttgttgtgctcgctgcggacttggacgcatcactggcagccgccaacaaggcggggctggctcgtgaagcggcgctgcgccagcagttggacgacgccaccaaatcgctggagaccatcactcagcttgcggggcgcgacgaacacatgaagcacctgagccaggtgcgtgggtacgcgaatagccgcgccatggttgcccgaaatttccttatcacgtcagcggagggtgtgcctcatgaataacgaacgtattcggttcctggtagagctgcttggcgcggtagcccacacggcgtttcgcgcagctgatgacagcgaggaacgtgatgaggaaggcagtcgcatccatgtggtgggttctggcgacttcgatgccttgtcgaaagcgctggacgcttgcgatgagctgccggaattgggtgatgcgtacgttcgtgacggctggcttcgggcgctggacgagctgcgcgggctgctggcggctcctatgacgccttggacggccctggttgatggtaggcatgagaatggcattcggtacatcggcgccagcgactcccatgtgctgggtgatgtgtaccacgggtatggccagctggttgtggggcgcatgggcgaagaagggtatgcagaccgccagggagtcctctgctggcgctacagcaagtccggcgaacaggtggaacctcacttgccagtgactcactggcagcccttgccggcgccgccagtggcccgtccgagtatcaccccgattaaattcagtgattcccctgacggggcggcggccgaggccgtttatctgcgccaggtcgcagcggaggatagattcaatgggaactgatcaaacaactggcgccgtggtggtcgatatcgaagatggatttcccaaggctctaatcgaggaagtcctggcgggcatgggcaccacagagggccgtcgggcactgaggccaaagctgcgcgccctgctggatgcgcctgcatgtaaggcctgcaacgacaccggcaaaatgcacgaatctgggcaagagcctggcgagtgcgcggcatgcttcaaggagtcagccgcccagccccaggtcgagccagtaattgccggtagcgttcttgatagctacgactatgcgattgcagacctcgatcctgaaagcgcttgcacctacctgtcgaatggtgagttggcgcagctggtcgcagcagtcagaacgttacaggttagatacttgacgcaacccgagccagatgcggcgctgtgtggattctacgaagtgacgggctaccctggccttgtgcgtgagctggttggccatgtggcgcagctacaggattcagccaagcgcaacgttaaaccctgggaggacacttttccgccgacacttctgcctgctcacgtcgagcgtgttaacgccgcgaatgcggctctacatccgcccgccccggtaccgggtggttggaagctggtaccaatcaatcccaccgcagaaatgctcaaggccgttgatgatgaggcatccgacaagcacctggcccgcggccgcgcagtctgtgcgtgggggttgatgctcagcgccgcgcctttgccttccatcatggacctgcactatggcgtggcccatgcggttgagtgccaactacctgcgcggagccagcccggttaccagggtgtcggcggtgtgcattttcctgcgccggctgttgtagagccaatcctcgtggaagctgtggcagttacccgcgagtgcgatgaggaaggcctacgactggattggttgattgagggtggtatcgctgccctggagcatcctggcaccgtgctactggtggcccagggcgcactgaccaacgacagcggcaacggctatgtctacccagcacggaatccagaagatgacgaataaagcacaattgggcggtatcaagatccttcaaaacgatatgctcccgtctatgacaatgatggtcagccccgacctgttcaccaagctgaccgatacgccagagcaggccgaggccaagcaccaggcaatcctggccaatttcgcgctgttcgatcagctttttaagcgccacatttcaaagccgcagtgccagcagccacaggcgcaccctgcacgctgcggctgtgaggttcgatcatgaccggtgcaacgcgtgtcgagttcacgataaagcagggtgacgaggttgtgactgcaaccctagagattactgaggggttcagccttaccgaggtggtggacgcagctctcgccggcattttcccaatgacgacgactgcgacccaaggacggtggccaccgctgcctactggcgcccttacgaagctggcgcttgttcctgaccaggttgtcggccgtatatacgatcagcctggccaaccattgcgcgccgttctgaactcaaccgggcgcgcgctgccagatgacactcggctgtacgcccgccccgctgatacgcttctgcgctatgtccgagcgccatcccggaaagatcccaaataccacgaggaatggcccgagattgaaggcgggccggtgttcgatggcgtcacgtactgcaacgatcttttcgaggcgctaaagcgctataacgttatagtggcagaaacgctgccagagggcgcactcgatgagtaaggcgaaagaggcaaagttgcaggctgtcctggacaaaatcgtggcggacacggccgtggccaagaagctcgccaaagagctttatggcgaagacgcgcacctgtttgaagagtccggcgggctgttcgtgatggatggcgactcagacggctcgccgcgctcccgtcagaagcacatccggctcaccgcccatggatattgcaatattcatgggggggcttggtgatggctgaccagcaactgagtgagtctgtgcccgccgaagaagtgccgcattgctacctggtaattgcggtggtcgattacgaaggcttcaccatcctcaaggggttcgatagcgcgccggccgccgaggctttccgggcggcggctgagacgtatcaccgtacggcccctgaatggcctgctgagggttcgccggatgaagaatacgagcgctttcacgctggccatgcagattggctccgtgctcatccaggtggtgtgctcgcgggcggcgctcatagcttcggtatcatttcagtcccatacgtggcatcgctctcccagcccgctgtggctgacatctcggccgtgctggcggaccaggcccgcttggtgcgtgagctggacgttctgttgaatggtgaggatcgcgccgccaagcaggcaagcctctgcgatatcgttgctcagttgcgcacgatgatgaaccggaaagccggtagcgggactccgcaaggtatagaccaaatccgtgcacagtatggccatttagtcggggggcacgacgaatgagaatcgttgaccgcaagacattcctggccatgcccgtagggacagtattcgccaagtatgacccgtgcataattcgcgagccgatggtgaaatgtgactcaaccccgaatgcaggggagctggtcgacttctactatgcaagcctgactgatgaggttgattgcagcggctcatgtgagcgagacggcatcatggatttggcagtgatagagggcgcccctttcgccttacatttcaacacgcaatgccgtgatggcatgcgtgacgctgatcagttgttcgcagtgtgggagcgggacgatgttgttggtttgattgccaggctccaggtggcgcttgctgacggttaccaaacctcgaccttgctacctagcgaggaagcccagtgagtgaagaagtagagccggttcctatcgtagtgaacattaaggcgccaggtgatctatctgtcggcgattacgtgtttgccagccggtggtctgactgtacccccggcgacccgtggcatgtaggacacgtctcggaggtgggggagggctatgtggtggtgggcgaagtgtcccagcgaaagtggggcaatgccatgcgcgtaacccatgagcagggggcccgtattattgctgagtaccctgccatggaggatggcccggccctgccatacaagggtattgcccgcgtattcggtgtgcaggtgcctgacggatatggcaccaagaagttatagcgctaaagcactaaggcgccttagcgttgatttgtatagcccgcattgccctcaggtgcaattgcgggttttttgttatccggcccggcgtgagcctggaggcgtctttcatagtatcttgcggccatggatggaaaccaaaccacaagggaaagcctcaagatgtcgaaaaagatcactgcattggcgctcgctacgggcctgtgcctggctactggcaccaccactgcatccgccggcgtgaacctgttcaaggactacgtgcaaggcaccaccattgcgaaatacacccgttcggcggggtattacgactgttcgaacaacgtgcaaaaggcccggtgcactgacggcttcgatttcgttggcgagaagttcaccgtcgcgttgttcttccgcgaggacaagctggacgtggtggcgctgatcgcgccgtataagcaggatctgtacccgaaggtgtccgctgcccttgccaagaccttcaatatcatttctatggaaaacgagaaatcgtttatcgacatggtgacgctgcgcaacactgccacccaagatgagtacgtgcaaaagttcgtggcctttgaagatgccgctttgtctgcgggcgacctgacctatacctacctggaagtcccggaaacggttggctatgccgatgtgggcgcaatcctagccgctgcgccggaagatgtgcgccgggcagctgtccgtctcgtgagcaataatcaggcttcaagcgtggtggtgcgttttgagctgcccaacgtaagctacaaacacgcgtcgaccgagcaattttgaaaggagccagtgcgctatgagtgccaatgagcgtattgccgccagcgaacagctggagggtgtgggcttgccgccgcgtgtgcgtgcgcatgccgaaaaacatctgtcccggatcaagatagccggcgacgtgcaggcagtgcgcttggctcaggcgcgtgctgagggatatgtggagggattggacatcgctggcgcactcaatcctggcaccgtggaagcgctgtatatcgccatggacaacgagggcgcggcccggctgatagagcttgagcagtaacgggtttacgccccttgctcattggcagctttgtcgacggcctcggcgaggatctgcgctgtcgtgctgagctcgctgtaaatcttgtttaattcaagttccggcgcgctggccggtgtgcgccggtactgcgcgtgcagccgccggaaattacgcagagtgtcggacaagtgcggagtcagttctagggtgatattcatcgataggcgcctgtagttgcttgagccgttatcctgccacgtcacaagcccctgaatcacaaaaggggcttttttatgctcgaaaaccaaataaaaacataaaaatgatgtattgatatttttgcccggtgtatagtggcgacaagccagaaatagccagttgggtgcatgggcatgtcggacacagataacgtggtagagataggcgaactgcggcttgcacgcgtaaaggctgactacacacgtcggcacgaaggctgccagcaccgtcttttagaaatggacgatgtgggcgaagttgtcacttgcagggactgtaaagttcaagtatccgcgtactgggcgctcagcattttgcgagagcattggcgcgagcacgcgctcaaggttggccggactctggcggccgctcaggaagagcgaggcgcggtgctgcatctgactgccgcgaagaaggtagagaaggcgtggcgcaacaaaaccatggtgccgggctgtccgcattgtgaccgagggatctttccagaggacggcctgggcggctctatggtcatgcgccggtttgagattggcctgcgtgagcgcgagcgcgccgacagcatcgcccaaggcctgccggcggtggccaagctgttgccccgcaagcccgccacgcgcaaggcggctgctccaaaggctcgatccaaggtcaagccccgcccgcagtgggtaaatgccccggcgtgggccgaatggcttaccagcgatgctaaaggtcgctggacctggcaccagatagagccattcgaagtttcgaacgaatatcacagcggctccatgtgcgagtttgccggcaccacgctggcgcccgtggatggggctgtaatcaaagaaaagcgcccacggggcgaacagggagtgccgcaatgaacgatgagctgcgcgacaagatggtggccaacgctgccgagtggcttaaaaaccatacttaccgtgaactgaccaatgcgaacggcgtagaggtgtggcgctgccagcagccaggaagcaacaacctggcgtttgatatttgcgtaacccgctacggaatggcgatcttcggcgatatcgggcacctgacgttcgacgtgggggccgactacgggatcaacttcctgcgtaacaaatccttgggctacctgcatgggaaactggcggcttcctgcaaagcagtagagctggataaagacagcatccttgaaagcgtccgcgaagcgattcttgagcttatcgacgaaaacgtcccggtcgagctgaaacccgattggctcgacgccggtggcgatctggaccagctaaagctatggcttggtgaaatatccagagcgggcgacgacgaaacgcttgagtacgaggaattgctcgactgcatcactcatattgagcgttttgacgacggcgaacgcgacattgtgccggccttcgacttcctggtcgaaagcgaaaagctgctgggcgtgagcgatacgtgggagtggggcattacaaagaccactgaggcggtttggcggaaaatcttctacgtgcagcatgctgccgacgccatcatggctcagaagggcgcggccgaagagctggcggtggcctcatgaccttgcgagagcagttcgaagcaaaacacccggtaccggccggtgttcagttcgacgagcacctaaaggtctactacgtcgagccaggcccgcacaacgtcgccaagcagctgcattgcctttgctggaacatgtgggttgagtcccgcgccgaaatgcttgtgcagcttcctgatgcccattcctacacggtgccagacgttgctggtgctgcaatcctcgattgtatggccgccatccgtggcgccggcgtaaaggtgaaatcatgatcccagggcagcctatcgaaaaaatcgaaaaagaagccgacctttgcgcgctgttcattcaggaatttaacaagctgcctgactggacctgctacccggaagcggcgggcttcgacatcctggtggtgcacactgacggccgccagatcggcgtagaggcaaagctttctctcaacgcgaaggttgcagaccagatcctgcctggacggggcgcggatttgaatgagctgcctgggcctgactatcgcatggtcattgtcagcaagatcactgacgccagcgccggcatagtgaagatgcttgagcggctgggtgtcaccgtgatgctgcctcgatccagctggacgcgtgaaggcaataaatacacctttgaccttgcccacaagttgctggaggtgagcggtagcaagccgttttacgacttgtacatgtacgactggaacccagcggagcggtgccaagtacccatcatggtgacaaacctccctgctggcgtgccggcgccggtgaggctgacaccctggaaagagtcggccctgaaagttatggctttgctgcgcagccaggggttcatcacggccaaacaaatcgccgggcatggtataggcgtgacggcctggacccagccgggcggtagcaaacctgcatggctcgcaaagggcgatgctcgtggcacctggatcgagacagagcacttgccagccttcgataagcagcatcccgaggtctatgccttggttgttgatgcgcttacagcgactcagcctgtattggagctgacagcatgatcatccccgcagctgcaatcctgttcatgctgtggaacatccataaggggccgcgggcatgaggactgttcgcaggatcgtcgatgacccagcagcccaatacggtttccgctcggtaccagccacctacgaggacgccgagaagatcaccggctttcgtcttgaccgccgggttaactactcgatcaatcaggacggtgaggtagagcaggagagctggtgcaccctggactgctctgggtgcgggtgtggctgtgagggcggttgcgggtgcgggccatctaccgggtgccgtgaatgtggttacaccggcaaaagccggcactacttcggtttcccgccttccccgccagaccgaaagaacccttaacccaacctccacaacatcctgccggcgaccggcgggcgaggtagtgctatgcccgcgaattgtgaatacagcatgaatcccagtgatgccatggacatatcaggcattgctcaactcgacctggccatgcgccgccaggctctcaccgggtacctggagcggaacggccagcagcgtctggtggagctgatggcgcagttcattggcatggccaactccgtagcggaaaactgcgccgaaatgagcgaccaagtgctgatcatggagtgcggcgtgcaccccgataggttcgatagcgtgaacctgccgaccatcattggcgcctgccagggagtgttgatcgcgagcaagtgcgacccggccggcgcctgccacggctgcgcctacaggcttggatcaattgccaatcagtcacctatcaccacctgtgacgccgagcacatggcccacgaccgaaaaggctttctgtgccatgcctacctggatgaggcagacgaacccaccaaggtgtgtgtcggccacgccaaagcgaccaagcaacaaccctaaaccctgaaccaacccaaggaaaacgatatgccaacccacaataagcccacgaaagccccggaatacgcgtatgcgctggcaaacgactcggaagactggggcgcagacgacctggccccattcgtttctgacaatgaactggccgctggcgcgatcatcgcgcgtggcgtggtggtccgtcctgatgcgagcgacttcctgccgggcgccgacgatatcgtcaaccacatggccaacagcgccaacgatgagcacagcgagttctgcgacggattcccggacttgagtgatgcagctgaggcagagctggaggtcgcgctggaggcgctgaaggcgtgggccgaaaagcattgcgctgtgaccttctaccaagttgtgcagatcgagagctacacggtgacggcagaagacaaggccgccgctgatcagtacttaagccagcagcaaagccagacggcgtaggcagcgatctaagcaaagggcgccagggcggtgcccttttttgttgggaaaatggccgcatgacgaaacgatggataagcgaagagtatttgaagagcctcccgccggcgatgacgcgccgggcgctctcttccgccccttcggcgccggcagtagcaagcccggccaagaaggcctcacgccgcggtgccgataaggccgcaccagttgaggcgccgccggtggtgagcgatgtgccggccaaaacctcaacgcagcgtatgcaggcgctggggcggcttcctgctggcgtgatgaataagaccgaagaggcttatgcggcgcacctggagcagttgaagcatgaagggaaggtgctgtggttcaaattcgaagggatcaagctcaggctggcggataagacgttctacaccgtcgatttctttgtcatgcccctgagcagggagctggaggcgcatgaggtgaaaggtttctggaccgatgacgcccgggtgaaaatcaaggtggcggccggcatgtacccagtattcaagttcatggccatcaagaaggagtcaaaggcggagggcggcggttgggccgtcgaagacttttgagtggcgagctgcctggagacgtgacggccgcccatgaaacttacattagccatatcatgttttgtgcagtctgctacgcgccgaagaatagccattgtcttacaggtcgcggcttgagaattgagtacgacgcactttatttgatgtcgattgtcgatacgcgcgtccggcgtgaatggctctacagagaggccgagcggaatcccgcaaacgcagacgggctaaaggctcgcgtgattgagctgtacaacgacgagcaggaaaaagcgcagtaagttgtccgtaatgccacttgaatagccaacttctagcgcctttctggcttgccaaatgtatagggatactttctaattctcgccgttgagacgtaccggggagggtgctttagatggtcggggacaaacaaatcgcagcggctaacacagagcaaggcaccacgcctggcgattgcgaccccacgtcgctctcactgttttgcgactcggaagacttgggcgtaggcgcggggctcaaagagcggcgcagggctgaggaagtccgcttggcgggcattattggcagcaagttgcgccgggcccgcaagtcggccgggttcaacgaaagcgcggccgcaatcgccctctcgcaggagggcatgacgatggtgagcttgtacgagaatggccatcgtccacccagcctgatcaacctgaggttgctggcacaattgtacggcgtgaccactgattacttgctggacatgcacgacgacatcctggccatgccggaagagggcaatcaggcggtgctgaggggcattatcagcacctccctcaatctgcacttccaccagttcaccgactctctggctcgccgcaacgccatcatgatcgaggcgctgagccttgatcgcgctcttttgtccgatttggccgtactggccacggatttggtcagcgctttgagcgttttcaaaacccatgctccgaacttcgacgacattcgcggaggtgcaaagcttgaccgtttggtcagctcattgcgtgaaagcatggagcaacagattcgccggcgtcagcgggaggaacaaatggccgattacgagccgaccaacccggcgctggaacagatcgccagtcatgtgcagcagcttttgttttagttggacgtttcacgcgctggagaggtggacgcgtatagccctgcgtggcggccactggcttcaccagcttgttaacgggggcagtgacaccccccaccggcctagcttcggggttggtgggggtttttaagggttacgcataccggagcgctttgggatagagcgctgcggtatgcagtaggccgaaaggcggcaagtccggcggggtggagggaaccgccagcgtgagtggcgccagcggtacgggttgaccggacgcttaagcgtaccgcctgctgcatttcaaatttgcttcggcagatagcttggcctcctttaagggcatgtgatgcggtcgctcgttgatggtggtcaggtgtgctgttcgcatcgggcatatgacgtttcttagacagggcgtttaaacaccacagcatggataaccgacaggagaggggctttaccgcctttgcggcgccggtcagtagcgttccgttggctgatagcggtgggggtcttaccaggatcaacgcccaaagaatggcccgccctgcgggccatttttttaaagtgaggcgcaagaagttggccgtattgccacggcctgtagcgaacatattacgcatgaggtccatggatgccgcgcaagcctgaaactgaaaagcctatcccggcgggggatgatcaatccccgtccaaggcggctacgcgccctcgtaaacctgcaaaaccgcgttcggttaatgttaacaaggacgcgcagggcaaaaagcccgccaaaacggtaccgaaaaagactgtggggacgactgcaaagccacgggcaaaagcgccggcatcgaagcctcaaaacaagaagccagcgcgcggtaccactgtaataaagaacccggtaaagctttcgctgaaagagcgtagagctatggaaatggcggctttccaaggtttggatgcccgccaggcgaagttcgtcgacttgtggctggttacctacgacgcccggcagtcctacaaggatgcgggctttgcatgcaagaacgataacgccgcgtcagcaggtgccagccgactgttaagtaaggttaagcaccacccatatacgcaggcgcgccaagtcgtgaaagatcccgcgtccccgccgaagccggcagcttctcgctctgtgtcggccgcgccagcagcacccgcgccgctcatgccgctggaaacttcagcaccctcgccggcggcgaagccgcgcgcggcgcccactggtgtgcctggcaaggtccaggtcctggactggtaatcttgtcggctcgcgccttaaaggatcccggccttggccgggatctttatgcccgctccgcgggccgagcccagaagggaaaacggtgagtgccgtgctggtaaattcggcgttagaaacgaaaaaaccaccgtgaggtggtttcttcgttaagcactttcatatgtccgcgggtggaggctttcgccctcgtttccctcggctactggattcaatctaaggatattcgcggttgtcgtcaatgcttgctcaacctatcgcgcctcgattgcgaatctgctcagtagctggactatttgctcctggtactcgctgcactcgtccaggagcactgggtcgccggataaccccggtaaataaacttcccagtaaattccgatcgcatcaaggtggatcgcgaaccagtttgaaaattaccgataaaatacattatcgttatattgatgccgccgccggcaccgatgaatttgcgtccatcgtggtcgtgatcgctaatgacgaggggaacccatcaacgaggatgttcccccatgtatgacgacaaccagtgcctgatctgcggtctgcccatcgagccagttgaatggatcgaggatttgagcgggatcggcgatgacttcaccgacctggtgagcttccaggatgacgatgagctgtgctgctgcgcagtcgaggatgaggatgactgaactgactgaaaagcaaactggcgacctactggccgccaacgagcgacgtctcaccgccgctgagttccagagcctggccgaggtgccggccgcggccgagtggttcgcgaacctggacaacccgcgcacgcgccgcgcttaccagggcgacatcgaggacttcaccggcttcctgggcatcacggcccctgatcagttccgtgctgtcacccgggcgcacgtcctcgcctggcgtcaccagctcgaacagcgcggcctggccggggcgacgatccggcgcaagctggcggcgctggccagcctgttcgatcacctgctcgatgcgaacgccgttgcaggcggtaacccggtgcacggggtcaaacggcccaagattgaaaccaccgaaggcaaaacgccggcgctgggtgaccaccaggccaaggcgctgctggaggcaccggatccgtcgaccacgaaaggcctgcgcgatcgggcgattctggccgtgctgctgtaccacgggctgcgccgcgaggaggcagcacgactgaccgtccaggacattctggagcgacgcgggatcaaacatctgcgcgtgcacggcaagggagggaagatccgctatctgccgctgcatccggtcgccatggaacggatccattcgtacctggaagcctcagcccatcagcttgaacagactgcagcaccgttgtttgtgccactgcgaggccggaaaacaggggctggaatctcagcggaggggatctatgccctggtcgggatctatgcccgggctgccggcattgaggtcgccggtctgggtgttcacggcttgcgtgcgacggccgcgaccaatgccctggagcatgaggccgatatcgccaaggtccagcagtggctagggcatgccaatatcagcacgacgcgcatatacgatcggcgagcttccagaccggaggactcgccgacatataaagtgcggtattaggcaccgccgccctgcgggggctgtggcggtcggaatggggtaatcgccttgctgatagatccagtcagaatctgacggctgctcatagacagcccccccataatcccctgcatcgagttttcgtaaggattgaggcccggttcgcttagcgaaatcatattgagcacactacgggggaaactggtgatcaactgagcactggtaacgactacgttccagctcagaaggattgtcacaacaaccatcagcaagccgccgatcaggatgccgccgaggctttccagcggacgcccgacatcggcgacccccggatcaaaaatcccccaaagtcccatcgccatagcctggaccatggccaaaccaacggcgctgatcacgatcgctgcagctagtccacccacggccaaggcaggatagagtccgatgaagatgaaagcgttccaacctttggcggagagctgggaagtgtgttcttcccccttcggcgcagccatgccggcactccatagggtcacaccgaagaacgtcgtcgccactgcgacgagccagctgattgcccccatcagtccataaattgcgaataacaacggcatcacgtagccgagcagcccgccggagataatcatcacgccgccaactgccttgggtagcgttccatcggtgattgagctcaaaccaggaatatattgggctatcgtcccaccagcaaaaaagccaatgccagtgccaacaagcgagcggccccatgctgcaatgttgtgaatattttggttgctcgggccggtcgtaagcttgaggatatcgagcgaaaaaactctggccagcagcgacttttcagcaccggtgttgcctggttgaatttgagcaagagcttcactttcgacaagttttgaaagcgagtcgcccggggtcatcgccgacagcgtggactttggcatcatctgtgcggtcgcgccctctgcgtagctcgcagcacgtgagaagtcgctcgctgcgcgcagcacgaaagtgccgccgagcatccaaccccagttttttacttcgtcaaaatacgcctcgctgcgcgccgcttgatcggtggctatagttgtggcaatcgcgctttcgacagttttcttgtaccaatctgctgtttgagaggtccagttaatgctctcctcgaagaaccgctttgcctcagcaggacttgccgatccgtctcgcagagagattgcctgcccaacagcgtgttcgactaaactaatccagatctgtcgctgcgctgctgtaatgcccgcttcaatcgatgctgagttattttttttgacctgcgcgtattcgtccgagcatgtcatggacgatagccaaccggctttgcaaaaccagccttcagtctctagctcacgcccaactgttccgtccactgcatccggctcgattagcccttgcacccccatcgcaacggcgcgagcgagatcgtcgcttggtggtatcaggggtatttgcagagatcgccccgcgttagcgatatatacacccgcagcagcactaccggaagctggatatttatcgccatgaacttgattccacctgactttcagtgcttcttccgccagtgcacgccctgtcagatcaatgagtttgtcattaggatccttgaaaactttgagagcagctaattgtgtcgccgatactttccaagagttgagcatatccagagcaactttggcatccacctcaacttgatacttaggatctttaaataagttatgtcgatgcatcagttcgaacgcattgtgttgcatcgtgtcgccaaattcggccgcagatttggagacacctgcgacaagagcgtgtcccggcgtcaacgtgatcggaatcccgccagcactagagacagggataaccggtgcaattaaagacaaggcgaagatcatccgcagcgggtagaaaaaagcctcgtttccatcttttgcaccgaaaaaattaccgttgtttttgagtcgaaaaataccaagaaacatgacccaggccgctagagcgccgaacatcgcgaggccaagtgttgagaacgcggacgcaaagatcgttagtggtgttacgtcctgcgcaacaaaatcagtaacgtctgatgagtcaaatatccagcgcccaaacatccaggataaaaccaactgagaaaaactattcattattagccctcacccgaacttggtaatcagccggcaacgttttaccgacaagcaaaatcggcttacgaatgacttccctcataaattttattgctgatggggcgctttgcgaataggccatattcatacgatatgcattttgaaaaagcatcatgcacaccatattcataaaggccagatttgcaaaaaccgtcaagctgcctcggctccagtttgcgactagattaccaagcaccacagcaatactaagaataagaagcgcattaacgaacaaaagtgacttataggcacgccgcaatgagtcagtggtagtaatgctttctacgcacattcgatcccagagcagtcgatcatcaatttctgccagttcgcggtcagctttcgcctggtcacgaatagccttgaaccagcgataaccccctttaataaagtagatcggcaagctaactgaatatttcagctcgcgtgcagcattcttcgtctggctgtagccggtcaaataacctgcgactgttttgagcttactcatgatcagcctcactggaataaactggtggaactggaaccggcggaacctgtatgtcagcgaatatatttgggtgaggcattggtgtcgcttcacgccctggaacaacaaggccaaagtagataattaagccaatcccaatcgcccgtggaatttttactgaggcctctttaagcagcatttctaatctcctcacctaagattatttctacagtcccagccagggccgctattacgtgagcgtcgtgctcacagatttcaggtaattcgcccgccttgacttggatctcacggagaacagctaaagcgcggttaagtttatccgctgtaatgctcatactctttcctttcgattttctaatgactaaattttaagagctggcaccaaaaccttccaattgcatatttctaatcatgcaaatatttttgcaattccgtcagcatataataatcaaatatgacgaagaatttagcgcccacaaccctcaaactaatagctataaactatgtcttaattattaatatcgcacccacaaaaaaccccctcattgagggggttatttgcgaagcttgatcagtaccggcgaagtattgcggtcatctcgttgtagaactcctggggatgctcaccatgggtctcgatgtcctcctcagctacatatgcgcgccaagtgccattctcaaaaacaaacttaaatccatcagtgcttgctgttcggcgattgacgccgccgtagttgtcaatgggacggactttttcgacgccatcgatgaccagggataaatagccggtgtctggattgctttgctcattccagaaggtcagttcgattttttttgccttgggtgtgccgagtgcatcctccagatattgcgaggctttcgcactgtaaactgcgtcagtagtcgcagctttcggcatgacctgattcatcttctgttcgccacacccaaccagggcgaccagagccagcactagtatggcgattttgattttcatgatttcagtcctctttacttcgcaattttcagagtgagcaaggccatgtaagcagctgcagtcacgtacagcattgccagaactgcagatccagcagttgtttgcccggtgtgagcggcgtatgtcaggccggcgatcgcaaacggccaggtcatcgctgcagcgccgcaaccgaacaccagagcaaacatcaccagagcagcgagccagcggaaaccagggatcgaaacatcacgaccaaagtcgacacaggcctccaggccggcgaccagaaagcgcactggactgcgagcgatctggcgagcggccgtgaatccgggccagaaaatactaagtgcgttcatcgtttatctcccgcaccaggtcctgctgcgcttcgcgccaggcctggatcatctgtttaacctcaacagagccgtgatgcagtttttcgcgtgtacctggagcaagccggatcctcgtgctggaacccatctcggcatatacgccaattttgatcttcagttcctcaagctccatcaggtcaacagcaccggactcaaccatcagtgcgaccgcttccaggtgctcgccctgcatcaggagcagggcgacatccaggcttggcggtggagccaggcgcaggctcattactgagccttatccatggccacgggctggatcggtgccttgagtcgaatctcaacgcggcggttctgcgccctgccctcctccgtgccgttgcttgcgatcggctgggacgggccagcaccgtagacctggatgcgagttttattgataccctggccgatcaggtgtttaccgacgctgatggcgcgcttctgcgacaactcgatgttgctggcattgccgccaacgttatctgtgtggccagtgacctcgacgttgttgtcagcgtaggacttgaacgagcccgcgagcttgtccaggttgaatgccgccgccggcgacagctcggtcgagccagtgttaaaagtgatcgcgcccggcatcaccagcttgatgtcgtcgccttggcgctgcacttcgatgccagtaccggcggtggctttacgcagttccgcctcttggcggtcggcatagacgccgtaacccgcgccggccaggccgccgataccggcgccgatgagtgcgcccttgccgcggttgtttttattgatcaatgcgcctgcagcggcgccggcgatggtgccgatgctgccccaggtcaaggcctggttgcgcgacccgtctttgtcggtgggggcgaggttggcgcagccggccagggagaggatgctgatgatgagcgaagcggagataatctttttcattgtcgagtcctttactgcgactggttgatttggtttgcacgcaatggcatgcgaagccgcgggagcggcagatcaactggtgtcacagcgaagacccgactgggcttttttagttattgcctcccctaccctgtcgctgatcctggtaggttcggtttatgcatcttacgccagttactgagcttacgcaacttacataacacaaataaattaaataagttacttctgttgcacggcttgcagaaggcgtgagatttcatcctcgccctgctccgagaggagggctactgcagcacggataacatcggacttcgaagccctgaatccgcggggaatgaggctcagtcggtcgatttctttatcaagctcatcggtaagcgaaaacgtcacccgcttatataccttggaaggtgccggcttcgcagcggcagcgccgttcttgccatcgatctttgctgcattgataaagtcatcagctgcttgggaggttgcagcaggattagcagctcctttacgcaagttaccgacacccatcacttagccccccagagttctgccgcgatcatttcgatttcttcgactgcccgagggtcggttccgacttcaagcacggacgatccattctcatcggcgtcgtcatagacgttgcgcgcagtggtaaatacctggagaggttcaaggccatagctagcgcatgcagctttcgaatcgagtatccgctgaatctgactggggagggcaggggcttgagtaacgattgcgcgagccaccagatcggggttcacgcttttagccagcgtaatgagttcttcaacatgagccaaggtcttgagatcgcgacgcttaggccggaaaggtagaagcgcatgggttgctacggtgagagcggatcgcagagctacagagtcagcgccgccagcatcgacaacgatcgcctcatagcgcttagctcggtcgaggagcgttttacgaatgtcaccgtgggccgattcgacctggagatcctgcagttcaggattctgctcgcgctcacgcgcccagtcgattgacgtgccctgtgggtcagcgtccagcagcagcacgtcagagccctttctttgcagccacaccgccagattctgagcgatgcagctcttgccgctcccacctttctctccgccgagcaccaggatcatttggttcatctgtgtacccttcatcagttattgaagttgcactacttatgtaagtcgaacaattacacaagctcggtaacttatgcaagttattcgtcttatgccgatttccgcgcgagtcgcttgcctgttatttgtcatctgctattataacgttatctgttatttgttatccgttatctgttacagagggatgcgtcatggcgacagtcacacaagagcgggtttatgcagcagctgaggccattgaggccgctggcggacgggcgtcggtgcgcgctgtgcgcgatcacctgggcggtgggtcgcccaaccagatcaccccattcctcgcggcctggcgggcgaaaaagcctgtcgtcgctgctgccgagatccagttggatccgcgtatcggtcagctgatcgctgagcaagttcgagtcgccgccggcgaggctgcgaagcgagctgacgagcgcgctgctgaggccgaggacacgctcgcgctatgccagcaggagaacgcagaaattgccgaacagttggccaccgcactcaacgccctggatgagtcgcgggccaaaggcgagcagcaggcaggcacgatcggcgaactgcgcgaagaaattgagcgcgtgcgccgcgaagctgatgaggaggtcaccgaggctcaggcccgcgctgatcgcgagcgcgaatctgccgaaactgcgcgccaggccctggctcgggccgagctgcgtctcgaagcgctgccgcgcctagaggccgaggtcgagcgcctgcgcgctgccctggaggaagctcagtctggccgtcaagtcgctgagcaattggcagctgtcgcgacggcaaagctggaagctgccgcgcagcgtgttgaagctgctgaggaacgcgagcgcgatacccgccagcaggctagcaaggccctggaaaccgctgagaaggcctcgggcgaagctcatcaggcgcagatcgccctgcaggccactcaggcccgcctggagtcaacgagtcgcgagctcgaaaccgcgcaagccgctgctacagaggcgaaagcggaactgaaagagatccgcgccgagatcaagaaggcctcgaaaggggagggtaagtgatggctacagcaatcgattacgccggcgcctggaagcgcctgaatgaggctctggcccggaacgtagaccaggccgaaggcgatgccgagatgtttgccttcttgctcacgtcgacactagccgcattcggctcgcaaggcctcctcgatgacaaagctgcaacccgggcgatcgaattgcttcacgagctgcaccaggtagaggtttgacatggccacgtcgatggcggtgccggtaccggagatccaggagcgcgatttcgcgctcgactgggtgaagtggctagccctggtggccatgatcctggaccactcctggttcattctgccaccagaatggcaggagcccggacacggcctgcgtgtagctggcaggctcgctttcccgctgttctgtctggccatcgccgcgaacatcgcccgccagccggccggttttccgacaggcctcggccgctacctgggcggtatgctgtttttcgccatgctgagccagccggtctacgcgaagtttttcgaaaacggcatgctgaacattctgttcacgctcgcggtcggcctgccgatagccgcggccgtccagcatcgaacgccggcgctgatcgtcggtgcgctcgtctgcacggccgtcgcgtacgcatacggatctgtcctcgcgtacggaacctggggcgtcctgctgcctgccgtcctggtggttgcaatgcgcgtcagggactcggagctcttccaggtaatggccatcgtctcggggatggtcgcgctgttggccaacgccgccctactggcagttttacgggatctgacgcccgttcaatatagtcaagtcgccgccatcgcagtggcgccgctgctaggtctgctggtattgcaggtcaaggctccaccagtgcggccggtgggccgctggatgtacgccttctatccccttcatctcctcgttctaagctcgctggccatcgcctggcactgactcattctcaccaggcgccgccggaatttctggcggcttgccgctcgcaccgtatctgaaatcactttcttcccttccggggggcttttgcccttggccgcaaggccgcaccgcaggtctgtggtgagttgttcgagcgaaagccgggtcaaggggttggtgcggcctgcaggcgcgtagcgccgaagcctcggccccttgacgcgactgtagcgacccaaagcctcagcgaagggtgtgggcggtgctcttccgcccgcaccccgagcactcggcggcccgaggctcccctcgcagggcgaggggcgggggggagtggatagattacgggtgcaggggcgttacgctcctgccgagggtctggggcgagcagccccagggtgtttccgccccgcggcgaagccgcgaagtgggtgggcctagatggcttttgctctatgttgcgtcttgcgaattagtttcggtatgcacggtccggggggcgccgggtcgggcggagcccgggcgggcatgagccggcgggggcggagcccccaggaggcggcggcgcgattccgcgacgggttaaatataggttaaagataaggttaagtggttcgaaaccgggctgtagaccaagtaccacgcggcttccagaaaacgcccggaggagttatgccaacggatggaggagttatgccaatgaacggaggacaaatgccaatggcatacccccgcttggaggagttatgccaatgcatgtggataactatttctcgcggtgccagcgggtcttcaggagcaacgtttcgcccgctttttcctggtagatctcggcttttgtgataatgcctgctcgctccagttcgtgtaggcctctcttaagccccttgcgcggcgctaggaaggatttcagggtgcgatagcggcttgggccgaatagatcttcaaccgcggcgtgatgccagcccagaggctgctcctcgacgtatgcgcgcaaccacttaccgaagtcgctcgggcgccaccacttaaccatcctgcggccagctttcaggtagaactcgtgatcctcgataatgccaagctcctccagttcggtgagagcagccggcaagccgtagtgagcgtcgaggaagttcttcagggaagagctcgcagcatagaagtcgcgcagggtttcgactgcagcgtaatgccaattccccggctcatggctggcgacataattctggagcagacgcgacataccgtgagtcatctgcaagcgagcatcaaagtcgatgaatgccagttcgcgtttgctatagaaggtcgcgatttccggatcgagcgctagccaataatcggattccgtccaagccatgtctttcaccaggcggaacatcttgcctttcccttcgccgtcttcgatgaacatcgtcgctgaagctaggcgctgcagagagtctttcagccacttgtaacccgaggttccgggttgccgaccgattgcctgcagaaagtgagaacgtacaaaatggatctggccacctggtgcgaggccttggcttaatcgcattgcgtgtaggaagacatcattgtcgccagcatcaagctgctcgcctgtgtagaggatcgagacatcgctgcggctggccaacggggttttaacgaaactacggcggcgccccttcttcacagcagcgaaaaggctcgttcggatccacttgttgggcatcgccgatttttcttcggggaacaggggtatctgtaccttcacctctggcttttctgaggtggccacctcttcctgaactgctttcagcagatcctgttgctcagccttatctgcgctggccttctgcgtgttacgcgcaagcttcgccgccatgcgagcgttcagccctgcttttgatacacttttctctgtcattacgatctccgtcatcgaaatggcatggggtgggccgaaggttacgacttcggcctgccttactcttcttccttcgcgtcgagaatcaccccgcggttatcgacgaactcgacaccagcggcgatgaaagcggcctcaacaccgtcatgtgaagctggatgcagcgttcgagcgccacgctcgaagctgctgatggtctgccgcgtcactccagcgtgctcggccaaagtagcttgatcccatctgagaagcgctcgcgctgctgcgcattgttcgggcgtcattgccacctcaatcgttttgcataaagttcgatattttgcattaaggaaacaaatggcggacttatgccaatgatggttaccgccccgagatgagccttgcaaggccttctcgttggtgcctactgttttgcattatggaaaatattttccctaatgtaaaacaattaggctcaattggcgaaacaagaggaggagttatgccaacgcaattgcaaaagaatacggcggcaagaagcgggaggggggggattcagcagcaccgccgcttcgcgggtggccacctcgggtgggatacattgaatatcgacggcacggcgccttcgcgatcaattcctgcaggtgtcagcgtcagttctgctaatccggcgcagaaggctgcgcctgctgcgctatccagttccgaatgtactccaagacacgattagcgccatcgactgtctcggcgagttcgatcgggcgttcaccccccatgtacgggttcggctgttccatccatttgtgcgcggcggccttgctaccacggacaggaatagctagatccaggatctcctgcagcagctcaggttgcccgtaccaagattctggcttagtggttgccttccgaccagggatgacgcgaggtaactggcaagcagctagctcactaacgttgacgtactcccgcttccaatgcgcgagcttcacgaggtcggtattcggcgggcgcgtgtgatcagtagtcggcacaaccacgccgatcaacacattggtatgggccctgatcatctccagcgccggcgcaatgtccgtgtcgttggtgacgatgaccgcgtgatcgatctgcccggtgatcgcgtcgtggtaggcctgcagggctaggttcacgtcgctctgtttctcttcgaccttccaagcttggatctcctggcattcgcggggagccctatcgggatcctcggcgtcgacgatcttcaccttcattttgttgacagcgtaatagccttcgatcagttcgattcgaccgtcatgcagcttgcgcaacgctgtgtggtagcgcgcctgagacgatactgagtcgggagccctggcaacggactcgatgatcttcgcggtgaagaacttgatcgagggggagggcagcagggccgattgccgaatatggccatcaccatccttgaccagcgcagacggcaggatgtgtttttcgaagaggggcagcagatccagccacttgtggggagtaccacgtaagcagccgtagtagaagttgtatccatcgatgtagatgcgagtgcgcagaggctctagctcaggcgttccctgcatttctcgtactccagaaacgaaaaaaccggctagcgccggctttttccccctccaaccagatggtcaagccacgccggtcgtgagggttagttgttgcgcgcagtattgcgcaacgaaagtcgtgatgcaagatgattagcaattagttgcgtaaagctgccgttaactggagcgatccgtctgccgcttctcttccttgcgaatctcttcctggagggtgtgcgccaactggacatgggccagtgtccgaaagaagtccggaaccggcccaaaacgtgatgagaggaaaatcgggggccagaaacggcgaatccctctctaggagggattctcagccgtcgattgcatgcgttcgacggggcaggtcgttcttgcgtcgcgctaggcgaactgctttcgcagtaacggggtgcaatcctttcggatccctgtaaccaccctgtcgtacacgactaagtcgcaagttaattatgcaaagatcttctacaaacgtccacaaggcccattgatcacttttgtttatgtcttgtcgtcaatgtacggtaaatcacatatgtgtgacttaccgtacacgaagcaccgccatgcgggattgactttttggcgagaagacgagcgtcggccagggcattgtggggtggctcctcggtagacgcggcacatcgtcatgcggggttgctccattgagctatgcaccgtgcataggtcgacaccttagcaaattcgtaattaccaattgcgaaccggcgccgaagcgccggcccgctgcccggtgtcaccagacgtatgacgcggaggttcggaatacgggtttaccttcgcccgaaacgccagacacaccgccagagataaccacgttgttccgcggcgcgtagccgaaagatacacctacagcatccgccccattgtagtggccggtgccaactgcgacggccttctggccttcctgcagggcgggcatcatcggttgcgccgcgacggccgcgataccggcgctgaggaatttctcagtttttgcgatctcgcgatcggtgtaagcgttggactcctgaacggcttcctggacggcctgatcgtaacgagcatcggtgtagctgttcgctgagttgagggtcgtcgtgctgctgttatctacataggtttgatcaacagtagaaccgccgccagtgcctccagtgcctccgcccgaagtgccgccttccacgacggtgatacgttggtcgaggttggtgatgtcggctgccattgcatcggtgatggcgcgcatctggcccacgttcaccgcatctgtgttggcgataccagcagaaataccaacgattcggcgggtcatgccgctgccgccgaacgatacggtgtaaggatcggttgcccgggcaccagtgccgaaagccatggagtagttaccggtggcctgggcatcgagccccatggcgattgcgttccagccggtggcccgggcctggcttccgattgcaatgctgtcgttcgtactggcgagagagttgtagccgatagccgtagccccccatgcagttgctgacgagtttgccccgatcacagttgcgccgatggcgaaagcatttgccccgcggccgactgctgtagcgtcgtaatagcccagagtcgaatcacccgccactgcgtccataccaaccgcaacagaggttaatgcagcagatgcattacggccagttgctacggagttgaatgaggcctgcgactcatcgccaacggctaccgagtagtcggaggccgatgcagccccccctacagcgaccgagttcgacactgcatctgcgttctcgccaatggccgtcgagtcgatcgcagcagcggcgccgtcaccgatggcaatcgagctggcgtcggcgctcgcgcctgtgccttgaggggttacgtctgcgttggccatgccggcaaaaatgatagtggcgatggccagggccagtttgttgaaacgatccatgctacttctcttcttcatgtttgatgtcgaggggcagtgcccctccttccgtggtcttcaatcgggcaactgggccttgatctcggcaagtagatcgatgatgcgggcctgttcacgcggatcgcgtggggccgcggcctgggcaactgcctctgcacgttcgaggagcgttcgcagcgcatcccggtcgttctcgttaagatcgagggcgaaagttgtccgaacggtcattttaattgtccatgtagtgcgagctggataccggctgtctggcacatagccatcagtgccgaattgtcgtaacaaaagatgaacaggccggccaccgcattgcctggtgaggctaggtgctggatctgcatggaagtatcagacatggtttcttcctttcatggttaaagggggttgccgccccctgttgggtgttaaatgccgcggggccttggccgaatctcggcttcatgctccgtggcttgttcgcgttcgataggttgggctggtgaggcgacagcgacttgctcaggctgcgccggcgcggccttgattacggtcgactcggcctttatgccctgcaggcgctgcacagcctgattggggtcttcgccaggctgcaggccgatgcgttcgcgcacgtcctcaatttgagcgccggggaatcgttcagcaaggtgcgcagagcgctttgcagtgtgatggtcgccgccttgatcgcggtcgtaagccatcgagaaatggcggatgttgtagcgctcggccaaggcgataatggctttctgagtcttttcgccaggttcgccagtcgtccccacaaaaaggatccgctgccgctcctcttggggggcgagctggtaggtgctcagggtgtcgacgccaccctctgaaaaccggatttccgtaggattcgcacagtgagggttcgcgaggtagatgcctttctctgtctgagtcgtgaagcctttaaactggcgaagttcgtcatcgatcaactgagcgccacggtactcatacccgcagaaattgccctttgcatcgatatgagggaaaacagcagatccgtgcttacttgtacgccagcgcgtttcggccaggacttcaggcgagatccctcgctcctggctcaagtaggtatcgcgccggcccatgaaaccgaaagtccgatagtggtctttcgtgctggaggcgattgcctcctggcgttcccgctccttctgctgacgcgcttcatcgcgtgcccgctcgatacgagattggtcttccgatgaattacccagcgatgggagcacgccaccctgaaatgcaccaacatcgcccttggcctgggcgaagctcccgcctctgacttcctggtagagcttgaaaatgtcaccgctcttgcccgcatgacggtcgtgccagatccagttgtcatcagcggcctgatagatgtcgtatttccccgcaccgtggcgaaagaccgcatgacccttgtacgaggcctgtttgtcgtactccatgcccagatgagcggcgtactcaaccaggtttacatcaagcttcatcgctgcgacttcgcgggcgtcggctgccttgtcgaatttcatagcacgctctacatcagtaccaggaacctgccgtcgcactccaccaagagactgtcgatcagcgtgtgtgttatcgggcaatagaccctgacgtccccttccgggacctgctgccagatcgcatgaggacagcgtacgcagaccgtctgagggagatcgccctgcagggcgcttaacgttgccgagcggacgggagatggcttcctcgtttgcggcttcaccggcgccggcggcgcggtcaaattggccgaggctgccggcaactcgctggcctgcggcgccggctcgggattcgggtcgggaaactccatcggcggcggcgacaggtcgtccatcaacgcgggggtatcggccgaggccggtaagggtggcagatctggcaggatcaattcggacatagcgggcctccatgggcacgggtttaacgaacttgagcttcgtggtgaatagggcgggcttcatcaccttgagcgtttcgcacaggtcgcgccgctgttcgggtggcacggatgagcctgggtttgtccagggtccaacttcaatacctggagcggggttttctgcagctacaacagcaacgcggcgggcggtgggcggccaggtctgttcatcagcgcaaaggtcgacaacggcagcgccgaaggccttggcgtggtcgatctcggtttgaacgggcggcaggaccgtgactgactgacggggcttttcttgaggctgttccttcgcctggccggggaactggaagagtcgtgaaacaccctggaggcgatcgaggacagacagttgttgaggggccagcttgaacggctggccggtgtgcacggatgcgcgaattgcttcgcgggcttgcggcatcaggtcaagggcgttgtctttgtagacgtattccgcagtcgactttttgaagggcagccagttggcttcactcagataggttttgcacccgtgaatcccacgggtataggcgacgtaccaggcctgcagcgaggcatacgatgacggcaggtaatacgactgcataacagtcataccctgcgctttgtggccggtcatcgcatagccatactgcagcgactcgtactcactggcgttgatcttgaccgtcttcccatcatctctggcgatggtgaacagaatgtcatcgatccgctcaccgtcaaattcacggctgacacgctcgatacccagaacagtgcccaggtcgccgttgtagacacgttcgtgctgggcatccttggccgttttgcgcaacagcagtcgatcgccaatagcaacctggagcgtgaagcgctccccgggaagtacctcggtctcgatactcacgctacgctcaacccgcaattcaccacgagcgaatcgggcatcacggatcttgtcgttgagcgatctaacctgttcgttggtgtccgcgaggacgaggatctgggaccagtccaactctcgaacaacaccatcttttccgggtaggccggttttcatgtcggcaaaaacatcgccaaccagttcgtcagcctcgttcacaccgtccgcgaaaaccttgagctggtcctcgcgctgcatgtggcggatcgcatcgctcaccttgccttcgtagagggcctgagcagtcggcttgaactgatcggtctgacgggcgatcgtttcgattttggcgcagcggtcgccaacagcgtcatgcagaagcccgaacagtgcggcggtttctacggcgtcatgctggtttctatcacccacgcagatcagccgggcgccggcctggtgacaggtcaccaccaggttatgcatctggtatgtgtccaacatgccggcttcgtcgcacactacgatatcgccacgtccaatgaggtcctgctttttgaatcgctggccggcctgctgagcggccagggcctcttggtgcttaatgagcagcgaatggacggtctgagcctggatgccggtcgacttcgccagctccgtcgcctgcttgtttgcaggtgctacgccgatgacgcggcgcccctgcgccttgaacgcttcggcgtacacacggaacgtgggtgcgagcgtggccgatttgcccacaccggcggcccctttcagaaaggtgtactgacctggccccgtcaggtcgtatgcagcctgcctctgctcctggctcagccgaaacggtttctcaccgggcttctggatcgcctgtttctctcgctcgtaggcatcgaccacctgatctacaacggcccgatcgacgttccaacgcggatcgtcgaggccggcataaacggctttaagacagtcagcttcgagggtgattagctctttcgtcgtgtaccgcttcggcggcatccggccgtgttcgtccggctgctggggaatttcgataaggccgagttgtttgaaaatctccgacttggttgcttcgatttcatcgagtccacctttgccaatggtcaggtgcgcggctgcagaatcgatcgcgaattcatcgatcacagtggatccgcggaacaccatgcgctgcagctcagcgagactcggtgcctggagatctttggcggttgatgccttcagctcgacagtgggaatcgtttggcgccaatgaccatccaggctgtcgcctagctcaatgtccttcgcatcgcggcttcggacggcgatagcctgagctgcagcttggccagaggtggccatagtcatcttctcggcctggatctgctcgctgcgcttggaaaactcggcgacgagttccttcgaaactgaagcttcgttgagacgcaggccatgcccgctccaatcaacgaccatcgccgatgccaactcgggcagttgtgcctggagacgctgaaaaaaggccacatcaaagacggccccaaactccttctgggtcttgtatagccatcccgcatcgagggtcaggaacttgccgtcgacggtgcgaacgaaattcggccgctccagatgcacatgcaactggggatcagggaagtcctgaccaggggcgcgacgtgctgtgcaatgagcatatgtcagggtgacgcattcgccggttacagactctgcgccctgagcgccttcacgcccgcgaatccgaccagcacggtgctcgcgctcaatcgcatcgttgacggctcccatcatgcattcctggatcacgcgacgggtttggtcgtcggcctgtgcccagtagatactgatggacttctgcaaggacacgcacgagctgaagccaaggacaggatccgttgccgatttttctttgccctccttctccagtcgctccagatcaccggcgtcgagctgctttttcgaggacgggtttgccttctttgattcagcttcctgaatagccttgtcgatggacttttggcgcgtctcatcaaggaacgcctctccggtgcgtgggttgatgcctcgaaaaagtgccaggtagtcaccatcttgaggatgctcgccgaggcccaacttgccggccagcgggccggcaattccagacgccagagtgtcgttgccggacttgtggtagtagtcctctcgccctgtgccctggtcgccctccacctgactgacgatagcggcgatctcggcgtcgactttcgccagctcggcagccatgacctcatctgtcacgccacgctctgcgccgagatcaatgcgcttctcacgtaaagcctggagctccttcagcgtcttttcgaagtaggaagccttggccgcaaagttaccggccgtggtcttcgcgttgctcatcccgtagtggctcatcgctcgatctccatgcccgtctgctcggcaatgaggcgatccataaccatcggcacgagccggttgagcatcggctcgacggtgccggcgagcagttcaggccggcgctcaacctggctggcgagaacctgcaacagcagatcaggaagagcagagcccagaagggaagaaacggattgggtgattgcgcctgccatcgaagccacaaccgggccatcgaggagaacgggaacaggtcgggaaggctcggcgctgaaacgctgcgccgccatgaagccggcgatttcttcgtctgtgcgtagggacatgagggcatcgagcacgcggccttgagcaacgcccaggcgagccgaaaggcgttccagacgcactgccgcaacttcatccaggtactgggtcgaggtctttgcccccgccttcttccgcgccattttccttttcccttctgagaacgcttctcaggtagccggcgtttgtcggcgtaccttgcttttgctttgttggcttttcggcttggaggccgcgcattacgcgggctccgggccgacgcgaagcacccgaagggtgcagatgtgttaactctctttgctcttgttctgctttgtaaaccaacatatgtagcattgtaaacccctataaaatatttttaacctttgtattgcgttgtaaagaaactaactccattattagcgccaagaggagccgtgatacccttcaagaaggtttacaaaggctaacggcgagggttacgcgatgttcaagtcaataattggtgactacatggagggtccaagcgtggaggacctgatcgaagcagcagcggcagaggccgaggccgaactgaagggcaagcgaggcagcgcccgagcccaactattgggccatgaagagcaactgctgctgatgctcagaaagcgcctgccgcttcgcaagcaagttgacacgcttaaattgttccgaccgccgatcaacgtgacggcggtcagcctacggaacttcctcatcacggaattcccggaacaatgggctgagtacctcgcggaaacagcgcgagggcgcaaggaaaaccgggtttatcgggatggctcgaaaccaactgatgatgagctgcaggctccgctgaccccggtcgagaaagctgaggttgacgagttcctgggggcggcaacccctgcgaagcaagtgaaacccgctgaaccgtcatccaagaaaccgccgcttactgttggcgatctccgtgcgatgacgggacagcttgatccagaaacgtaccgaaccgacgagtagtcgggataaccacgaaaggaagaaaatatgcgtgtagcactcgtcaaccttggcggcaaccaaggcaagaccaccctcgcagtaaacctgttcgccccgcgtatgccggaagcgaagatcttggcagtagaaacgatcaacgccgcgggcggtgatctgggcgctgccgttgagcagttgaagggcgagcagttcgcccggatctatgcggaacttgcttccgccgatgatctgatcctcgatgtcggtgcatcgaatatcgaagacttcttggtcggcctcagcagattcgaggatggccacgatgagatcgatctgtttgtcgttccctgtacgtcggataccaaggagcgtactgaggccattaagaccgcccatatgctgagcgcattgggtgtcccgaccgagaagatccagttcgtgttcaaccgcgttgtcggcgctgtagaaaccgaattcgcggacgtgctcaactacgcgaagaaaagcggtgcggctctggccaatcccgcgtgtgtagtcccggaatccgaacttttcgccctgctcagcgaccggaaaatgaacatcgttcaggctctggcggataccacggactacaaggccgagttgaaagctgcaacgcgcaacgacgacaaaaaagcctggcgtcgtgcaatggacatgctggccatcacgaaacagtcgaagtccatggatcgccagcttcagcatgtttttgagctgctgacctcgccggtaggtgcctgagatgagcgcgctcccgatgaatgttggcgatgctgctctcagccgggagcagctgatgctgcgcgaactgttccaggatcactacaatctggctgaccgcttcgaggctgccgcgaatcagatcgctcaggtcgagcgatcccttcacagcactggcgagcagccaggtattgccgaactgctgctcgatgctgcggatcagatccgcggcgctgcttcgaccatccatgggatgaacctagatggattctcacgggttctcgaatcgctcagccgtcagattgcaggcctcccgagtcgtctgctgaaaccagctgatgagatggattttcgcgcctcgctccgcgaggggattgcccaggtgctggctgaatcgatcatcgatgcaaagcttcaggtcgagagcgaggctgctgatgtcgctatcaccgacctggttagccgaatcaagatggcgatggcgcagatgggcgaaagctcggcgaactacttcgccgagcgcaatcagctgaaaggacaactcgaagctgagaaagaaaagaacgccgtcctggccaagcgaatggagtatttcgagcaggacaaagacaacgctctgcgtctgctctcagccgattttgccgcgtcgagtaatcgtgccggcaaggctcgattgctcgacttctgcgccggcatggttatcgcgctcctcgtgtctatgtccactcttgtgcccacggttgagcagtacctcaagaccccctcccaacactaccaacagcgctaacgcgcaccacatgaaggagaaaaatcgcatggctacccatagcgacgatgaagatttccgcggccgcacgaaacaggcgcggattctcggctacgacgccgaggcctggatcaaagccaagcgcgaagagcgcgagcaattcaaagcagttgtgggcaccgacatggatggcctcgacaagctggcccgtgatccgcacatggatgcaatccagaaacagcaccaacagcgccaagcagagtatgacaaggccgataagggtaagtccgaagcgtctcacttgcgcgagcgtagtgagcgcatgttggtgcaaatcaacgaggtcagctctcaggaaaagcaaatgcaccagggaaacgaacaaacccaggaagaccaggaagaagcgaagcaggggagatcgatgtgatggatagcaaaaaactggcgtttgtggcggctgcaatgattgccgcctttgttggtaacgcagcggcgtgcccgatcgaggaatgcatgccggaattaacccggaaagtcgaggctcaagaggcacgcgactcgatcaataatctgcgtgatcccgcccaggcagccatgcatgccggcctcgtggccgctgagtaccgggtagcgatcctggaagcggaaaaccgtgctctgcttcgtgcagttgagctgaaccaaaaacctgacctggccagcttgcgcctatttccaagtccccacgcactctatgacgcagtcagttcagacgtactgcaggtgacggtgacaggccgtatgccccagctggagcattttcagcgtcgcgtaaaacatgcagtggtggtggccttgatcgaagaagaaactgtgaagcttggaaagcctcgtcggcttatcacaccgagcgagtaaaaggttggctcacctgagcggcaactcaagtgagcctattccgcggtaggaaaacccacgaaggaagaatttgtatggtaacgcaattccagaagtacatggcaagtctgcttctctggatcacagatcccgaggcagctaaacgcgcctggcgcgagcgccgtacgcaggccattcgcgctgcgcttgactcacaactcagcgcggatactcgcggctggcccgttgatcagatcctccatgacgatgtgatcgaggcccttccgtcagatcgtgcggcgctcacgcgccgcgccttctatggccgcgccgcattccatgcgggcgctcgactccagaagcgcctgcgcgcccggaattttgcgctcagcgtcggggctctcgtgctggtatctgccactgcctacctgctgggtcgcaacggatccagcctcgcctggcagtggggatctacggctgccggcctgtgcatcgcaattgccggggggtatgtgttccgcatttcactcggtcttacgccgtctgcctggcgggctatggttccggccggcgcgctgctgacccaagatgaaatcgaggatgtgaaagagttcggtgcccgggtccttctgcgcgtgacgccgccacaagcgccggatgacctggttggcttgtatcgcgcttggacgtatgaccgcgacggcaatccggtggatggccagatcgtcccggatgatctgtccgtttcatatctgcgcaaagcgttggaggacgaatctgtaccgatggctgtcgctggtatcgcaattcttctggccggcctgttcgtcgccgccgactcgttgagctggtttatcgcgccggtcgccgcgggtgccgcggcggtatggtctttcctttgcatcgtcgatctggcatcgatcccgaaaacccgtgccgccgccgcccgtgaagcgctggctgtatcggcctttcccaagctgatagagcaagaaggaaagagcaaatttgctgatttcgatcgtgccctagatgagcagatcgagcgagcgatggccgagaattcgaccttcatcactttaggcacaacaactgatctatttgccgagcgccgtgatccgtacagcccagcccaagccggcatgcccttcgggttgagcattgccgatctgtcaacgcatctgctcgtcctaggtctgactggtactggcaaaactgctgcagtgatccgtccagtggtctggcagtggcaggctgcaaaagcgggcggtctgcttgtcctggatggtaaaggtcaactgccaaccgagttggtaggtctgcctggcttccaagtgatcagccctgaaaatgccccgttcaatcctatccagggtttgcaaccggatgaagttgccgaaactcttttccagcttttctcttcggaaaaaagcaattccggcgatgtaggcggaagtgaatgggaacaatttgccagggaattgctgcgcagcgcatctaaagtgctggcgatgatgaatgcaatcgagccagccgagtggccctggacccttggggcgatctacaaattggcgtttgaggcaggcagtcgtgatcgtgccaagcaaatcatcgaggaaaacagcaagtgcttcgatcttctgcccggtcatcttcgtcgcgcctacagcgctttcatggttcgccacatggagaaggcgaacgaaacacgctcgtcgattgaactcaacctggaaacctggttgggcacgctgatcaacgatcaggagctcggtgcctgggctgacactgttgatggtgtggaaatcgaggattgcctgtacggcgctatgctcggcttggctctgcctgatactcaaacaggtgttgccatctctgcccttgctaagcgccgcttttactccgcgatcaaacgccgcggcgatggttggaaagccgaaggccaacagcccgttctgctggttgtcgacgaggcgcaagatctggtgtcgcatgaggagcttgccatccttccgaaggctcgctcgctcggtctgtgcgcgttgtactccactcaaggtctcgacggcctccaggtcgcactccaggacgaacaggcgacgatcatgttgctcgatcagttccgctctgttgtgagcatgcaagtcggctctgaaatgaccctcgattatgtatctcagcgccttggcgctgcgcctcgcgtcgttttctgcgaagtcgcggccaacaccaccgacccggtagccaccgcaaatctgtatggggccaatgctggtggttattcgacaggtactctggccgccagagcgcagacatccgacgaaatgatcaaagttggccgctcgtatagccatgtcggccaggcaatcagcactgtctctgagctggccaaaaaactgggcgctgaacaggcatggcagcagctgccggccgcaattcgccgcgagcgacctgcgggcagcgtcaagattggtgaaatcccgctcgtgtcgcccgatgagatccggtcgctgacgatgaataagttcaccgcgctcgcgtcggtcaaccgctgcgggactattcgtcgcgcccagatccggctcaatcccatattcgcattcccgagcgaaacgaaaaccgtactggccgctgaggaggtggcagcatgaaaaactcttccgctcatctcctcgcccagcacggcgagctgctccaggtcagcgctgttatcaccggcgagcccctacacgacaaggcggggcgcatcctgaaagcgatcggcgtcgctgcgctctgcatcgccgttgcagccggcgcgggccacgttacccagggtatccgcgaagaagctgctcgcgtagcggttgcggagaaagccgaggcggaacgcctggccaaggaaaagcgtatcgctgcggctaaagttgccggactgcagaagcgcctgacggccatgcagacacagatcagtaccaagcgtgatgcgctgcaggagcgtttccagcggctgctggcggacatagataaggatccagcagttgccgaaatgctgcgccgatatccagcaccgtacaagccgctccagggaattgatcccgtcgcgttcgaggccttcatcgacctagatcgcgacagctggattgcgactggcaccagtccgaaactggatgagcattatcaaactgaaaacgccaagatccaggaaggcattagctatctggacaaaatcaaccgtgagctacagctgaaagatcccgcgtccccgccgaagccggcagcttctcgctctgtgtcggccgcgccagcagcacccgcgccgctcatgccgctggaaacttcagcaccctcgccggcggcgaagccgcgcgcggcgcccactggtgtgcctggcaaggtccaggtcctggactggtaatcttgtcggctcgcgccttaaaggatcccggccttggccgggatctttatgcccgctccgcgggccgagcccagaagggaaaacggtgagtgccgtgctggtaaattcggcgttagaaacgaaaaaaccaccgtgaggtggtttcttcgttaagcactttcatatgtccgcgggtggaggctttcgccctcgtttccctcggctactggattcaatctaaggatattcgcggttgtcgtcaatgcttgctcaacctatcgcgcctcgattgcgaatctgctcagtagctggactatttgctcctggtactcgctgcactcgtccaggagcactgggtcgccggataaccccggtaaataaacttcccagtaaattccgatcgcatcaaggtggatcgcgaaccagtttgaaaattaccgataaaatacattatcgttatattgatgccgccgccggcaccgatgaatttgcgtccatcgtggtcgtgatcgctaatgacgaggggaacccatcaacgaggatgttcccccatgtatgacgacaaccagtgcctgatctgcggtctgcccatcgagccagttgaatggatcgaggatttgagcgggatcggcgatgacttcaccgacctggtgagcttccaggatgacgatgagctgtgctgctgcgcagtcgaggatgaggatgactgaactgactgaaaagcaaactggcgacctactggccgccaacgagcgacgtctcaccgccgctgagttccagagcctggccgaggtgccggccgcggccgagtggttcgcgaacctggacaacccgcgcacgcgccgcgcttaccagggcgacatcgaggacttcaccggcttcctgggcatcacggcccctgatcagttccgtgctgtcacccgggcgcacgtcctcgcctggcgtcaccagctcgaacagcgcggcctggccggggcgacgatccggcgcaagctggcggcgctggccagcctgttcgatcacctgctcgatgcgaacgccgttgcaggcggtaacccggtgcacggggtcaaacggcccaagattgaaaccaccgaaggcaaaacgccggcgctgggtgaccaccaggccaaggcgctgctggaggcaccggatccgtcgaccacgaaaggcctgcgcgatcgggcgattctggccgtgctgctgtaccacgggctgcgccgcgaggaggcagcacgactgaccgtccaggacattctggagcgacgcgggatcaaacatctgcgcgtgcacggcaagggagggaagatccgctatctgccgctgcatccggtcgccatggaacggatccattcgtacctggaagcctcagcccatcagcttgaacagactgcagcaccgttgtttgtgccactgcgaggccggaaaacaggggctggaatctcagcggaggggatctatgccctggtcgggatctatgcccgggctgccggcattgaggtcgccggtctgggtgttcacggcttgcgtgcgacggccgcgaccaatgccctggagcatgaggccgatatcgccaaggtccagcagtggctagggcatgccaatatcagcacgacgcgcatatacgatcggcgagcttccagaccggaggactcgccgacatataaagtgcggtattaggcaccgccgccctgcgggggctgtggcggtcggaatggggtaatcgccttgctgatagatccagtcagaatctgacggctgctcatagacagcccccccataatcccctgcatcgagttttcgtaaggattgaggcccggttcgcttagcgaaatcatattgagcacactacgggggaaactggtgatcaactgagcactggtaacgactacgttccagctcagaaggattgtcacaacaaccatcagcaagccgccgatcaggatgccgccgaggctttccagcggacgcccgacatcggcgacccccggatcaaaaatcccccaaagtcccatcgccatagcctggaccatggccaaaccaacggcgctgatcacgatcgctgcagctagtccacccacggccaaggcaggatagagtccgatgaagatgaaagcgttccaacctttggcggagagctgggaagtgtgttcttcccccttcggcgcagccatgccggcactccatagggtcacaccgaagaacgtcgtcgccactgcgacgagccagctgattgcccccatcagtccataaattgcgaataacaacggcatcacgtagccgagcagcccgccggagataatcatcacgccgccaactgccttgggtagcgttccatcggtgattgagctcaaaccaggaatatattgggctatcgtcccaccagcaaaaaagccaatgccagtgccaacaagcgagcggccccatgctgcaatgttgtgaatattttggttgctcgggccggtcgtaagcttgaggatatcgagcgaaaaaactctggccagcagcgacttttcagcaccggtgttgcctggttgaatttgagcaagagcttcactttcgacaagttttgaaagcgagtcgcccggggtcatcgccgacagcgtggactttggcatcatctgtgcggtcgcgccctctgcgtagctcgcagcacgtgagaagtcgctcgctgcgcgcagcacgaaagtgccgccgagcatccaaccccagttttttacttcgtcaaaatacgcctcgctgcgcgccgcttgatcggtggctatagttgtggcaatcgcgctttcgacagttttcttgtaccaatctgctgtttgagaggtccagttaatgctctcctcgaagaaccgctttgcctcagcaggacttgccgatccgtctcgcagagagattgcctgcccaacagcgtgttcgactaaactaatccagatctgtcgctgcgctgctgtaatgcccgcttcaatcgatgctgagttattttttttgacctgcgcgtattcgtccgagcatgtcatggacgatagccaaccggctttgcaaaaccagccttcagtctctagctcacgcccaactgttccgtccactgcatccggctcgattagcccttgcacccccatcgcaacggcgcgagcgagatcgtcgcttggtggtatcaggggtatttgcagagatcgccccgcgttagcgatatatacacccgcagcagcactaccggaagctggatatttatcgccatgaacttgattccacctgactttcagtgcttcttccgccagtgcacgccctgtcagatcaatgagtttgtcattaggatccttgaaaactttgagagcagctaattgtgtcgccgatactttccaagagttgagcatatccagagcaactttggcatccacctcaacttgatacttaggatctttaaataagttatgtcgatgcatcagttcgaacgcattgtgttgcatcgtgtcgccaaattcggccgcagatttggagacacctgcgacaagagcgtgtcccggcgtcaacgtgatcggaatcccgccagcactagagacagggataaccggtgcaattaaagacaaggcgaagatcatccgcagcgggtagaaaaaagcctcgtttccatcttttgcaccgaaaaaattaccgttgtttttgagtcgaaaaataccaagaaacatgacccaggccgctagagcgccgaacatcgcgaggccaagtgttgagaacgcggacgcaaagatcgttagtggtgttacgtcctgcgcaacaaaatcagtaacgtctgatgagtcaaatatccagcgcccaaacatccaggataaaaccaactgagaaaaactattcattattagccctcacccgaacttggtaatcagccggcaacgttttaccgacaagcaaaatcggcttacgaatgacttccctcataaattttattgctgatggggcgctttgcgaataggccatattcatacgatatgcattttgaaaaagcatcatgcacaccatattcataaaggccagatttgcaaaaaccgtcaagctgcctcggctccagtttgcgactagattaccaagcaccacagcaatactaagaataagaagcgcattaacgaacaaaagtgacttataggcacgccgcaatgagtcagtggtagtaatgctttctacgcacattcgatcccagagcagtcgatcatcaatttctgccagttcgcggtcagctttcgcctggtcacgaatagccttgaaccagcgataaccccctttaataaagtagatcggcaagctaactgaatatttcagctcgcgtgcagcattcttcgtctggctgtagccggtcaaataacctgcgactgttttgagcttactcatgatcagcctcactggaataaactggtggaactggaaccggcggaacctgtatgtcagcgaatatatttgggtgaggcattggtgtcgcttcacgccctggaacaacaaggccaaagtagataattaagccaatcccaatcgcccgtggaatttttactgaggcctctttaagcagcatttctaatctcctcacctaagattatttctacagtcccagccagggccgctattacgtgagcgtcgtgctcacagatttcaggtaattcgcccgccttgacttggatctcacggagaacagctaaagcgcggttaagtttatccgctgtaatgctcatactctttcctttcgattttctaatgactaaattttaagagctggcaccaaaaccttccaattgcatatttctaatcatgcaaatatttttgcaattccgtcagcatataataatcaaatatgacgaagaatttagcgcccacaaccctcaaactaatagctataaactatgtcttaattattaatatcgcacccacaaaaaaccccctcattgagggggttatttgcgaagcttgatcagtaccggcgaagtattgcggtcatctcgttgtagaactcctggggatgctcaccatgggtctcgatgtcctcctcagctacatatgcgcgccaagtgccattctcaaaaacaaacttaaatccatcagtgcttgctgttcggcgattgacgccgccgtagttgtcaatgggacggactttttcgacgccatcgatgaccagggataaatagccggtgtctggattgctttgctcattccagaaggtcagttcgattttttttgccttgggtgtgccgagtgcatcctccagatattgcgaggctttcgcactgtaaactgcgtcagtagtcgcagctttcggcatgacctgattcatcttctgttcgccacacccaaccagggcgaccagagccagcactagtatggcgattttgattttcatgatttcagtcctctttacttcgcaattttcagagtgagcaaggccatgtaagcagctgcagtcacgtacagcattgccagaactgcagatccagcagttgtttgcccggtgtgagcggcgtatgtcaggccggcgatcgcaaacggccaggtcatcgctgcagcgccgcaaccgaacaccagagcaaacatcaccagagcagcgagccagcggaaaccagggatcgaaacatcacgaccaaagtcgacacaggcctccaggccggcgaccagaaagcgcactggactgcgagcgatctggcgagcggccgtgaatccgggccagaaaatactaagtgcgttcatcgtttatctcccgcaccaggtcctgctgcgcttcgcgccaggcctggatcatctgtttaacctcaacagagccgtgatgcagtttttcgcgtgtacctggagcaagccggatcctcgtgctggaacccatctcggcatatacgccaattttgatcttcagttcctcaagctccatcaggtcaacagcaccggactcaaccatcagtgcgaccgcttccaggtgctcgccctgcatcaggagcagggcgacatccaggcttggcggtggagccaggcgcaggctcattactgagccttatccatggccacgggctggatcggtgccttgagtcgaatctcaacgcggcggttctgcgccctgccctcctccgtgccgttgcttgcgatcggctgggacgggccagcaccgtagacctggatgcgagttttattgataccctggccgatcaggtgtttaccgacgctgatggcgcgcttctgcgacaactcgatgttgctggcattgccgccaacgttatctgtgtggccagtgacctcgacgttgttgtcagcgtaggacttgaacgagcccgcgagcttgtccaggttgaatgccgccgccggcgacagctcggtcgagccagtgttaaaagtgatcgcgcccggcatcaccagcttgatgtcgtcgccttggcgctgcacttcgatgccagtaccggcggtggctttacgcagttccgcctcttggcggtcggcatagacgccgtaacccgcgccggccaggccgccgataccggcgccgatgagtgcgcccttgccgcggttgtttttattgatcaatgcgcctgcagcggcgccggcgatggtgccgatgctgccccaggtcaaggcctggttgcgcgacccgtctttgtcggtgggggcgaggttggcgcagccggccagggagaggatgctgatgatgagcgaagcggagataatctttttcattgtcgagtcctttactgcgactggttgatttggtttgcacgcaatggcatgcgaagccgcgggagcggcagatcaactggtgtcacagcgaagacccgactgggcttttttagttattgcctcccctaccctgtcgctgatcctggtaggttcggtttatgcatcttacgccagttactgagcttacgcaacttacataacacaaataaattaaataagttacttctgttgcacggcttgcagaaggcgtgagatttcatcctcgccctgctccgagaggagggctactgcagcacggataacatcggacttcgaagccctgaatccgcggggaatgaggctcagtcggtcgatttctttatcaagctcatcggtaagcgaaaacgtcacccgcttatataccttggaaggtgccggcttcgcagcggcagcgccgttcttgccatcgatctttgctgcattgataaagtcatcagctgctggggaggttgcagcaggattagcagctcctttacgcaagttaccgacacccatcacttagccccccagagttctgccgcgatcatttcgatttcttcgactgcccgagggtcggttccgacttcaagcacggacgatccattctcatcggcgtcgtcatagacgttgcgcgcagtggtaaatacctggagaggttcaaggccatagctagcgcatgcagctttcgaatcgagtatccgctgaatctgactggggagggcaggggcttgagtaacgattgcgcgagccaccagatcggggttcacgcttttagccagcgtaatgagttcttcaacatgagccaaggtcttgagatcgcgacgcttaggccggaaaggtagaagcgcatgggttgctacggtgagagcggatcgcagagctacagagtcagcgccgccagcatcgacaacgatcgcctcatagcgcttagctcggtcgaggagcgttttacgaatgtcaccgtgggccgattcgacctggagatcctgcagttcaggattctgctcgcgctcacgcgcccagtcgattgacgtgccctgtgggtcagcgtccagcagcagcacgtcagagccctttctttgcagccacaccgccagattctgagcgatgcagctcttgccgctcccacctttctctccgccgagcaccaggatcatttggttcatctgtgtacccttcatcagttattgaagttgcactacttatgtaagtcgaacaattacacaagctcggtaacttatgcaagttattcgtcttatgccgatttccgcgcgagtcgcttgcctgttatttgtcatctgctattataacgttatctgttatttgttatccgttatctgttacagagggatgcgtcatggcgacagtcacacaagagcgggtttatgcagcagctgaggccattgaggccgctggcggacgggcgtcggtgcgcgctgtgcgcgatcacctgggcggtgggtcgcccaaccagatcaccccattcctcgcggcctggcgggcgaaaaagcctgtcgtcgctgctgccgagatccagttggatccgcgtatcggtcagctgatcgctgagcaagttcgagtcgccgccggcgaggctgcgaagcgagctgacgagcgcgctgctgaggccgaggacacgctcgcgctatgccagcaggagaacgcagaaattgccgaacagttggccaccgcactcaacgccctggatgagtcgcgggccaaaggcgagcagcaggcaggcacgatcggcgaactgcgcgaagaaattgagcgcgtgcgccgcgaagctgatgaggaggtcaccgaggctcaggcccgcgctgatcgcgagcgcgaatctgccgaaactgcgcgccaggccctggctcgggccgagctgcgtctcgaagcgctgccgcgcctagaggccgaggtcgagcgcctgcgcgctgccctggaggaagctcagtctggccgtcaagtcgctgagcaattggcagctgtcgcgacggcaaagctggaagctgccgcgcagcgtgttgaagctgctgaggaacgcgagcgcgatacccgccagcaggctagcaaggccctggaaaccgctgagaaggcctcgggcgaagctcatcaggcgcagatcgccctgcaggccactcaggcccgcctggagtcaacgagtcgcgagctcgaaaccgcgcaagccgctgctacagaggcgaaagcggaactgaaagagatccgcgccgagatcaagaaggcctcgaaaggggagggtaagtgatggctacagcaatcgattacgccggcgcctggaagcgcctgaatgaggctctggcccggaacgtagaccaggccgaaggcgatgccgagatgtttgccttcttgctcacgtcgacactagccgcattcggctcgcaaggcctcctcgatgacaaagctgcaacccgggcgatcgaattgcttcacgagctgcaccaggtagaggtttgacatggccacgtcgatggcggtgccggtaccggagatccaggagcgcgatttcgcgctcgactgggtgaagtggctagccctggtggccatgatcctggaccactcctggttcattctgccaccagaatggcaggagcccggacacggcctgcgtgtagctggcaggctcgctttcccgctgttctgtctggccatcgccgcgaacatcgcccgccagccggccggttttccgacaggcctcggccgctacctgggcggtatgctgtttttcgccatgctgagccagccggtctacgcgaagtttttcgaaaacggcatgctgaacattctgttcacgctcgcggtcggcctgccgatagccgcggccgtccagcatcgaacgccggcgctgatcgtcggtgcgctcgtctgcacggccgtcgcgtacgcatacggatctgtcctcgcgtacggaacctggggcgtcctgctgcctgccgtcctggtggttgcaatgcgcgtcagggactcggagctcttccaggtaatggccatcgtctcggggatggtcgcgctgttggccaacgccgccctactggcagttttacgggatctgacgcccgttcaatatagtcaagtcgccgccatcgcagtggcgccgctgctaggtctgctggtattgcaggtcaaggctccaccagtgcggccggtgggccgctggatgtacgccttctatccccttcatctcctcgttctaagctcgctggccatcgcctggcactgactcattctcaccaggcgccgccggaatttctggcggcttgccgctcgcaccgtatctgaaatcactttcttcccttccggggggcttttgcccttggccgcaaggccgcaccgcaggtctgtggtgagttgttcgagcgaaagccgggtcaaggggttggtgcggcctgcaggcgcgtagcgccgaagcctcggccccttgacgcgactgtagcgacccaaagcctcagcgaagggtgtgggcggtgctcttccgcccgcaccccgagcactcggcggcccgaggctcccctcgcagggcgaggggcgggggggagtggatagattacgggtgcaggggcgttacgctcctgccgagggtctggggcgagcagccccagggtgtttccgccccgcggcgaagccgcgaagtgggtgggcctagatggcttttgctctatgttgcgtcttgcgaattagtttcggtatgcacggtccggggggcgccgggtcgggcggagcccgggcgggcatgagccggcgggggcggagcccccaggaggcggcggcgcgattccgcgacgggttaaatataggttaaagataaggttaagtggttcgaaaccgggctgtagaccaagtaccacgcggcttccagaaaacgcccggaggagttatgccaacggatggaggagttatgccaatgaacggaggacaaatgccaatggcatacccccgcttggaggagttatgccaatgcatgtggataactatttctcgcggtgccagcgggtcttcaggagcaacgtttcgcccgctttttcctggtagatctcggcttttgtgataatgcctgctcgctccagttcgtgtaggcctctcttaagccccttgcgcggcgctaggaaggatttcagggtgcgatagcggcttgggccgaatagatcttcaaccgcggcgtgatgccagcccagaggctgctcctcgacgtatgcgcgcaaccacttaccgaagtcgctcgggcgccaccacttaaccatcctgcggccagctttcaggtagaactcgtgatcctcgataatgccaagctcctccagttcggtgagagcagccggcaagccgtagtgagcgtcgaggaagttcttcagggaagagctcgcagcatagaagtcgcgcagggtttcgactgcagcgtaatgccaattccccggctcatggctggcgacataattctggagcagacgcgacataccgtgagtcatctgcaagcgagcatcaaagtcgatgaatgccagttcgcgtttgctatagaaggtcgcgatttccggatcgagcgctagccaataatcggattccgtccaagccatgtctttcaccaggcggaacatcttgcctttcccttcgccgtcttcgatgaacatcgtcgctgaagctaggcgctgcagagagtctttcagccacttgtaacccgaggttccgggttgccgaccgattgcctgcagaaagtgagaacgtacaaaatggatctggccacctggtgcgaggccttggcttaatcgcattgcgtgtaggaagacatcattgtcgccagcatcaagctgctcgcctgtgtagaggatcgagacatcgctgcggctggccaacggggttttaacgaaactacggcggcgccccttcttcacagcagcgaaaaggctcgttcggatccacttgttgggcatcgccgatttttcttcggggaacaggggtatctgtaccttcacctctggcttttctgaggtggccacctcttcctgaactgctttcagcagatcctgttgctcagccttatctgcgctggccttctgcgtgttacgcgcaagcttcgccgccatgcgagcgttcagccctgcttttgatacacttttctctgtcattacgatctccgtcatcgaaatggcatggggtgggccgaaggttacgacttcggcctgccttactcttcttccttcgcgtcgagaatcaccccgcggttatcgacgaactcgacaccagcggcgatgaaagcggcctcaacaccgtcatgtgaagctggatgcagcgttcgagcgccacgctcgaagctgctgatggtctgccgcgtcactccagcgtgctcggccaaagtagcttgatcccatctgagaagcgctcgcgctgctgcgcattgttcgggcgtcattgccacctcaatcgttttgcataaagttcgatattttgcattaaggaaacaaatggcggacttatgccaatgatggttaccgccccgagatgagccttgcaaggccttctcgttggtgcctactgttttgcattatggaaaatattttccctaatgtaaaacaattaggctcaattggcgaaacaagaggaggagttatgccaacgcaattgcaaaagaatacggcggcaagaagcgggaggggggggagtcagcagcaccgccgcttcgcgggtggccacctcgggtgggatacattgaatatcgacggcacggcgccttcgcgatcaattcctgcaggtgtcagcgtcagttctgctaatccggcgcagaaggctgcgcctgctgcgctatccagttccgaatgtactccaagacacgattagcgccatcgactgtctcggcgagttcgatcgggcgttcaccccccatgtacgggttcggctgttccatccatttgtgcgcggcggccttgctaccacggacaggaatagctagatccaggatctcctgcagcagctcaggttgcccgtaccaagattctggcttagtggttgccttccgaccagggatgacgcgaggtaactggcaagcagctagctcactaacgttgacgtactcccgcttccaatgcgcgagcttcacgaggtcggtattcggcgggcgcgtgtgatcagtagtcggcacaaccacgccgatcaacacattggtatgggccctgatcatctccagcgccggcgcaatgtccgtgtcgttggtgacgatgaccgcgtgatcgatctgcccggtgatcgcgtcgtggtaggcctgcagggctaggttcacgtcgctctgtttctcttcgaccttccaagcttggatctcctggcattcgcggggagccctatcgggatcctcggcgtcgacgatcttcaccttcattttgttgacagcgtaatagccttcgatcagttcgattcgaccgtcatgcagcttgcgcaacgctgtgtggtagcgcgcctgagacgatactgagtcgggagccctggcaacggactcgatgatcttcgcggtgaagaacttgatcgagggggagggcagcagggccgattgccgaatatggccatcaccatccttgaccagcgcagacggcaggatgtgtttttcgaagaggggcagcagatccagccacttgtggggagtaccacgtaagcagccgtagtagaagttgtatccatcgatgtagatgcgagtgcgcagaggctctagctcaggcgttccctgcatttctcgtactccagaaacgaaaaaaccggctagcgccggctttttccccctccaaccagatggtcaagccacgccggtcgtgagggttagttgttgcgcgcagtattgcgcaacgaaagtcgtgatgcaagatgattagcaattagttgcgtaaagctgccgttaactggagcgatccgtctgccgcttctcttccttgcgaatctcttcctggagggtgtgcgccaactggacatgggccagtgtccgaaagaagtccggaaccggcccaaaacgtgatgagaggaaaatcgggggccagaaacggcgaatccctctctaggagggattctcagccgtcgattgcatgcgttcgacggggcaggtcgttcttgcgtcgcgctaggcgaactgctttcgcagtaacggggtgcaatcctttcggatccctgtaaccaccctgtcgtacacgactaagtcgcaagttaattatgcaaagatcttctacaaacgtccacaaggcccattgatcacttttgtttatgtcttgtcgtcaatgtacggtaaatcacatatgtgtgacttaccgtacacgaagcaccgccatgcgggattgactttttggcgagaagacgagcgtcggccagggcattgtggggtggctcctcggtagacgcggcacatcgtcatgcggggttgctccattgagctatgcaccgtgcataggtcgacaccttagcaaattcgtaattaccaattgcgaaccggcgccgaagcgccggcccgctgcccggtgtcaccagacgtatgacgcggaggttcggaatacgggtttaccttcgcccgaaacgccagacacaccgccagagataaccacgttgttccgcggcgcgtagccgaaagatacacctacagcatccgccccattgtagtggccggtgccaactgcgacggccttctggccttcctgcagggcgggcatcatcggttgcgccgcgacggccgcgataccggcgctgaggaatttctcagtttttgcgatctcgcgatcggtgtaagcgttggactcctgaacggcttcctggacggcctgatcgtaacgagcatcggtgtagctgttcgctgagttgagggtcgtcgtgctgctgttatctacataggtttgatcaacagtagaaccgccgccagtgcctccagtgcctccgcccgaagtgccgccttccacgacggtgatacgttggtcgaggttggtgatgtcggctgccattgcatcggtgatggcgcgcatctggcccacgttcaccgcatctgtgttggcgataccagcagaaataccaacgattcggcgggtcatgccgctgccgccgaacgatacggtgtaaggatcggttgcccgggcaccagtgccgaaagccatggagtagttaccggtggcctgggcatcgagccccatggcgattgcgttccagccggtggcccgggcctggcttccgattgcaatgctgtcgttcgtactggcgagagagttgtagccgatagccgtagccccccatgcagttgctgacgagtttgccccgatcacagttgcgccgatggcgaaagcatttgccccgcggccgactgctgtagcgtcgtaatagcccagagtcgaatcacccgccactgcgtccataccaaccgcaacagaggttaatgcagcagatgcattacggccagttgctacggagttgaatgaggcctgcgactcatcgccaacggctaccgagtagtcggaggccgatgcagccccccctacagcgaccgagttcgacactgcatctgcgttctcgccaatggccgtcgagtcgatcgcagcagcggcgccgtcaccgatggcaatcgagctggcgtcggcgctcgcgcctgtgccttgaggggttacgtctgcgttggccatgccggcaaaaatgatagtggcgatggccagggccagtttgttgaaacgatccatgctacttctcttcttcatgtttgatgtcgaggggcagtgcccctccttccgtggtcttcaatcgggcaactgggccttgatctcggcaagtagatcgatgatgcgggcctgttcacgcggatcgcgtggggccgcggcctgggcaactgcctctgcacgttcgaggagcgttcgcagcgcatcccggtcgttctcgttaagatcgagggcgaaagttgtccgaacggtcattttaattgtccatgtagtgcgagctggataccggctgtctggcacatagccatcagtgccgaattgtcgtaacaaaagatgaacaggccggccaccgcattgcctggtgaggctaggtgctggatctgcatggaagtatcagacatggtttcttcctttcatggttaaagggggttgccgccccctgttgggtgttaaatgccgcggggccttggccgaatctcggcttcatgctccgtggcttgttcgcgttcgataggttgggctggtgaggcgacagcgacttgctcaggctgcgccggcgcggccttgattacggtcgactcggcctttatgccctgcaggcgctgcacagcctgattggggtcttcgccaggctgcaggccgatgcgttcgcgcacgtcctcaatttgagcgccggggaatcgttcagcaaggtgcgcagagcgctttgcagtgtgatggtcgccgccttgatcgcggtcgtaagccatcgagaaatggcggatgttgtagcgctcggccaaggcgataatggctttctgagtcttttcgccaggttcgccagtcgtccccacaaaaaggatccgctgccgctcctcttggggggcgagctggtaggtgctcagggtgtcgacgccaccctctgaaaaccggatttccgtaggattcgcacagtgagggttcgcgaggtagatgcctttctctgtctgagtcgtgaagcctttaaactggcgaagttcgtcatcgatcaactgagcgccacggtactcatacccgcagaaattgccctttgcatcgatatgagggaaaacagcagatccgtgcttacttgtacgccagcgcgtttcggccaggacttcaggcgagatccctcgctcctggctcaagtaggtatcgcgccggcccatgaaaccgaaagtccgatagtggtctttcgtgctggaggcgattgcctcctggcgttcccgctccttctgctgacgcgcttcatcgcgtgcccgctcgatacgagattggtcttccgatgaattacccagcgatgggagcacgccaccctgaaatgcaccaacatcgcccttggcctgggcgaagctcccgcctctgacttcctggtagagcttgaaaatgtcaccgctcttgcccgcatgacggtcgtgccagatccagttgtcatcagcggcctgatagatgtcgtatttccccgcaccgtggcgaaagaccgcatgacccttgtacgaggcctgtttgtcgtactccatgcccagatgagcggcgtactcaaccaggtttacatcaagcttcatcgctgcgacttcgcgggcgtcggctgccttgtcgaatttcatagcacgctctacatcagtaccaggaacctgccgtcgcactccaccaagagactgtcgatcagcgtgtgtgttatcgggcaatagaccctgacgtccccttccgggacctgctgccagatcgcatgaggacagcgtacgcagaccgtctgagggagatcgccctgcagggcgcttaacgttgccgagcggacgggagatggcttcctcgtttgcggcttcaccggcgccggcggcgcggtcaaattggccgaggctgccggcaactcgctggcctgcggcgccggctcgggattcgggtcgggaaactccatcggcggcggcgacaggtcgtccatcaacgcgggggtatcggccgaggccggtaagggtggcagatctggcaggatcaattcggacatagcgggcctccatgggcacgggtttaacgaacttgagcttcgtggtgaatagggcgggcttcatcaccttgagcgtttcgcacaggtcgcgccgctgttcgggtggcacggatgagcctgggtttgtccagggtccaacttcaatacctggagcggggttttctgcagctacaacagcaacgcggcgggcggtgggcggccaggtctgttcatcagcgcaaaggtcgacaacggcagcgccgaaggccttggcgtggtcgatctcggtttgaacgggcggcaggaccgtgactgactgacggggcttttcttgaggctgttccttcgcctggccggggaactggaagagtcgtgaaacaccctggaggcgatcgaggacagacagttgttgaggggccagcttgaacggctggccggtgtgcacggatgcgcgaattgcttcgcgggcttgcggcatcaggtcaagggcgttgtctttgtagacgtattccgcagtcgactttttgaagggcagccagttggcttcactcagataggttttgcacccgtgaatcccacgggtataggcgacgtaccaggcctgcagcgaggcatacgatgacggcaggtaatacgactgcataacagtcataccctgcgctttgtggccggtcatcgcatagccatactgcagcgactcgtactcactggcgttgatcttgaccgtcttcccatcatctctggcgatggtgaacagaatgtcatcgatccgctcaccgtcaaattcacggctgacacgctcgatacccagaacagtgcccaggtcgccgttgtagacacgttcgtgctgggcatccttggccgttttgcgcaacagcagtcgatcgccaatagcaacctggagcgtgaagcgctccccgggaagtacctcggtctcgatactcacgctacgctcaacccgcaattcaccacgagcgaatcgggcatcacggatcttgtcgttgagcgatctaacctgttcgttggtgtccgcgaggacgaggatctgggaccagtccaactctcgaacaacaccatcttttccgggtaggccggttttcatgtcggcaaaaacatcgccaaccagttcgtcagcctcgttcacaccgtccgcgaaaaccttgagctggtcctcgcgctgcatgtggcggatcgcatcgctcaccttgccttcgtagagggcctgagcagtcggcttgaactgatcggtctgacgggcgatcgtttcgattttggcgcagcggtcgccaacagcgtcatgcagaagcccgaacagtgcggcggtttctacggcgtcatgctggtttctatcacccacgcagatcagccgggcgccggcctggtgacaggtcaccaccaggttatgcatctggtatgtgtccaacatgccggcttcgtcgcacactacgatatcgccacgtccaatgaggtcctgctttttgaatcgctggccggcctgctgagcggccagggcctcttggtgcttaatgagcagcgaatggacggtctgagcctggatgccggtcgacttcgccagctccgtcgcctgcttgtttgcaggtgctacgccgatgacgcggcgcccctgcgccttgaacgcttcggcgtacacacggaacgtgggtgcgagcgtggccgatttgcccacaccggcggcccctttcagaaaggtgtactgacctggccccgtcaggtcgtatgcagcctgcctctgctcctggctcagccgaaacggtttctcaccgggcttctggatcgcctgtttctctcgctcgtaggcatcgaccacctgatctacaacggcccgatcgacgttccaacgcggatcgtcgaggccggcataaacggctttaagacagtcagcttcgagggtgattagctctttcgtcgtgtaccgcttcggcggcatccggccgtgttcgtccggctgctggggaatttcgataaggccgagttgtttgaaaatctccgacttggttgcttcgatttcatcgagtccacctttgccaatggtcaggtgcgcggctgcagaatcgatcgcgaattcatcgatcacagtggatccgcggaacaccatgcgctgcagctcagcgagactcggtgcctggagatctttggcggttgatgccttcagctcgacagtgggaatcgtttggcgccaatgaccatccaggctgtcgcctagctcaatgtccttcgcatcgcggcttcggacggcgatagcctgagctgcagcttggccagaggtggccatagtcatcttctcggcctggatctgctcgctgcgcttggaaaactcggcgacgagttccttcgaaactgaagcttcgttgagacgcaggccatgcccgctccaatcaacgaccatcgccgatgccaactcgggcagttgtgcctggagacgctgaaaaaaggccacatcaaagacggccccaaactccttctgggtcttgtatagccatcccgcatcgagggtcaggaacttgccgtcgacggtgcgaacgaaattcggccgctccagatgcacatgcaactggggatcagggaagtcctgaccaggggcgcgacgtgctgtgcaatgagcatatgtcagggtgacgcattcgccggttacagactctgcgccctgagcgccttcacgcccgcgaatccgaccagcacggtgctcgcgctcaatcgcatcgttgacggctcccatcatgcattcctggatcacgcgacgggtttggtcgtcggcctgtgcccagtagatactgatggacttctgcaaggacacgcacgagctgaagccaaggacaggatccgttgccgatttttctttgccctccttctccagtcgctccagatcaccggcgtcgagctgctttttcgaggacgggtttgccttctttgattcagcttcctgaatagccttgtcgatggacttttggcgcgtctcatcaaggaacgcctctccggtgcgtgggttgatgcctcgaaaaagtgccaggtagtcaccatcttgaggatgctcgccgaggcccaacttgccggccagcgggccggcaattccagacgccagagtgtcgttgccggacttgtggtagtagtcctctcgccctgtgccctggtcgccctccacctgactgacgatagcggcgatctcggcgtcgactttcgccagctcggcagccatgacctcatctgtcacgccacgctctgcgccgagatcaatgcgcttctcacgtaaagcctggagctccttcagcgtcttttcgaagtaggaagccttggccgcaaagttaccggccgtggtcttcgcgttgctcatcccgtagtggctcatcgctcgatctccatgcccgtctgctcggcaatgaggcgatccataaccatcggcacgagccggttgagcatcggctcgacggtgccggcgagcagttcaggccggcgctcaacctggctggcgagaacctgcaacagcagatcaggaagagcagagcccagaagggaagaaacggattgggtgattgcgcctgccatcgaagccacaaccgggccatcgaggagaacgggaacaggtcgggaaggctcggcgctgaaacgctgcgccgccatgaagccggcgatttcttcgtctgtgcgtagggacatgagggcatcgagcacgcggccttgagcaacgcccaggcgagccgaaaggcgttccagacgcactgccgcaacttcatccaggtactgggtcgaggtctttgcccccgccttcttccgcgccattttccttttcccttctgagaacgcttctcaggtagccggcgtttgtcggcgtaccttgcttttgctttgttggcttttcggcttggaggccgcgcattacgcgggctccgggccgacgcgaagcacccgaagggtgcagatgtgttaactctctttgctcttgttctgctttgtaaaccaacatatgtagcattgtaaacccctataaaatatttttaacctttgtattgcgttgtaaagaaactaactccattattagcgccaagaggagccgtgatacccttcaagaaggtttacaaaggctaacggcgagggttacgcgatgttcaagtcaataattggtgactacatggagggtccaagcgtggaggacctgatcgaagcagcagcggcagaggccgaggccgaactgaagggcaagcgaggcagcgcccgagcccaactattgggccatgaagagcaactgctgctgatgctcagaaagcgcctgccgcttcgcaagcaagttgacacgcttaaattgttccgaccgccgatcaacgtgacggcggtcagcctacggaacttcctcatcacggaattcccggaacaatgggctgagtacctcgcggaaacagcgcgagggcgcaaggaaaaccgggtttatcgggatggctcgaaaccaactgatgatgagctgcaggctccgctgaccccggtcgagaaagctgaggttgacgagttcctgggggcggcaacccctgcgaagcaagtgaaacccgctgaaccgtcatccaagaaaccgccgcttactgttggcgatctccgtgcgatgacgggacagcttgatccagaaacgtaccgaaccgacgagtagtcgggataaccacgaaaggaagaaaatatgcgtgtagcactcgtcaaccttggcggcaaccaaggcaagaccaccctcgcagtaaacctgttcgccccgcgtatgccggaagcgaagatcttggcagtagaaacgatcaacgccgcgggcggtgatctgggcgctgccgttgagcagttgaagggcgagcagttcgcccggatctatgcggaacttgcttccgccgatgatctgatcctcgatgtcggtgcatcgaatatcgaagacttcttggtcggcctcagcagattcgaggatggccacgatgagatcgatctgtttgtcgttccctgtacgtcggataccaaggagcgtactgaggccattaagaccgcccatatgctgagcgcattgggtgtcccgaccgagaagatccagttcgtgttcaaccgcgttgtcggcgctgtagaaaccgaattcgcggacgtgctcaactacgcgaagaaaagcggtgcggctctggccaatcccgcgtgtgtagtcccggaatccgaacttttcgccctgctcagcgaccggaaaatgaacatcgttcaggctctggcggataccacggactacaaggccgagttgaaagctgcaacgcgcaacgacgacaaaaaagcctggcgtcgtgcaatggacatgctggccatcacgaaacagtcgaagtccatggatcgccagcttcagcatgtttttgagctgctgacctcgccggtaggtgcctgagatgagcgcgctcccgatgaatgttggcgatgctgctctcagccgggagcagctgatgctgcgcgaactgttccaggatcactacaatctggctgaccgcttcgaggctgccgcgaatcagatcgctcaggtcgagcgatcccttcacagcactggcgagcagccaggtattgccgaactgctgctcgatgctgcggatcagatccgcggcgctgcttcgaccatccatgggatgaacctagatggattctcacgggttctcgaatcgctcagccgtcagattgcaggcctcccgagtcgtctgctgaaaccagctgatgagatggattttcgcgcctcgctccgcgaggggattgcccaggtgctggctgaatcgatcatcgatgcaaagcttcaggtcgagagcgaggctgctgatgtcgctatcaccgacctggttagccgaatcaagatggcgatggcgcagatgggcgaaagctcggcgaactacttcgccgagcgcaatcagctgaaaggacaactcgaagctgagaaagaaaagaacgccgtcctggccaagcgaatggagtatttcgagcaggacaaagacaacgctctgcgtctgctctcagccgattttgccgcgtcgagtaatcgtgccggcaaggctcgattgctcgacttctgcgccggcatggttatcgcgctcctcgtgtctatgtccactcttgtgcccacggttgagcagtacctcaagaccccctcccaacactaccaacagcgctaacgcgcaccacatgaaggagaaaaatcgcatggctacccatagcgacgatgaagatttccgcggccgcacgaaacaggcgcggattctcggctacgacgccgaggcctggatcaaagccaagcgcgaagagcgcgagcaattcaaagcagttgtgggcaccgacatggatggcctcgacaagctggcccgtgatccgcacatggatgcaatccagaaacagcaccaacagcgccaagcagagtatgacaaggccgataagggtaagtccgaagcgtctcacttgcgcgagcgtagtgagcgcatgttggtgcaaatcaacgaggtcagctctcaggaaaagcaaatgcaccagggaaacgaacaaacccaggaagaccaggaagaagcgaagcaggggagatcgatgtgatggatagcaaaaaactggcgtttgtggcggctgcaatgattgccgcctttgttggtaacgcagcggcgtgcccgatcgaggaatgcatgccggaattaacccggaaagtcgaggctcaagaggcacgcgactcgatcaataatctgcgtgatcccgcccaggcagccatgcatgccggcctcgtggccgctgagtaccgggtagcgatcctggaagcggaaaaccgtgctctgcttcgtgcagttgagctgaaccaaaaacctgacctggccagcttgcgcctatttccaagtccccacgcactctatgacgcagtcagttcagacgtactgcaggtgacggtgacaggccgtatgccccagctggagcattttcagcgtcgcgtaaaacatgcagtggtggtggccttgatcgaagaagaaactgtgaagcttggaaagcctcgtcggcttatcacaccgagcgagtaaaaggttggctcacctgagcggcaactcaagtgagcctattccgcggtaggaaaacccacgaaggaagaatttgtatggtaacgcaattccagaagtacatggcaagtctgcttctctggatcacagatcccgaggcagctaaacgcgcctggcgcgagcgccgtacgcaggccattcgcgctgcgcttgactcacaactcagcgcggatactcgcggctggcccgttgatcagatcctccatgacgatgtgatcgaggcccttccgtcagatcgtgcggcgctcacgcgccgcgccttctatggccgcgccgcattccatgcgggcgctcgactccagaagcgcctgcgcgcccggaattttgcgctcagcgtcggggctctcgtgctggtatctgccactgcctacctgctgggtcgcaacggatccagcctcgcctggcagtggggatctacggctgccggcctgtgcatcgcaattgccggggggtatgtgttccgcatttcactcggtcttacgccgtctgcctggcgggctatggttccggccggcgcgctgctgacccaagatgaaatcgaggatgtgaaagagttcggtgcccgggtccttctgcgcgtgacgccgccacaagcgccggatgacctggttggcttgtatcgcgcttggacgtatgaccgcgacggcaatccggtggatggccagatcgtcccggatgatctgtccgtttcatatctgcgcaaagcgttggaggacgaatctgtaccgatggctgtcgctggtatcgcaattcttctggccggcctgttcgtcgccgccgactcgttgagctggtttatcgcgccggtcgccgcgggtgccgcggcggtatggtctttcctttgcatcgtcgatctggcatcgatcccgaaaacccgtgccgccgccgcccgtgaagcgctggctgtatcggcctttcccaagctgatagagcaagaaggaaagagcaaatttgctgatttcgatcgtgccctagatgagcagatcgagcgagcgatggccgagaattcgaccttcatcactttaggcacaacaactgatctatttgccgagcgccgtgatccgtacagcccagcccaagccggcatgcccttcgggttgagcattgccgatctgtcaacgcatctgctcgtcctaggtctgactggtactggcaaaactgctgcagtgatccgtccagtggtctggcagtggcaggctgcaaaagcgggcggtctgcttgtcctggatggtaaaggtcaactgccaaccgagttggtaggtctgcctggcttccaagtgatcagccctgaaaatgccccgttcaatcctatccagggtttgcaaccggatgaagttgccgaaactcttttccagcttttctcttcggaaaaaagcaattccggcgatgtaggcggaagtgaatgggaacaatttgccagggaattgctgcgcagcgcatctaaagtgctggcgatgatgaatgcaatcgagccagccgagtggccctggacccttggggcgatctacaaattggcgtttgaggcaggcagtcgtgatcgtgccaagcaaatcatcgaggaaaacagcaagtgcttcgatcttctgcccggtcatcttcgtcgcgcctacagcgctttcatggttcgccacatggagaaggcgaacgaaacacgctcgtcgattgaactcaacctggaaacctggttgggcacgctgatcaacgatcaggagctcggtgcctgggctgacactgttgatggtgtggaaatcgaggattgcctgtacggcgctatgctcggcttggctctgcctgatactcaaacaggtgttgccatctctgcccttgctaagcgccgcttttactccgcgatcaaacgccgcggcgatggttggaaagccgaaggccaacagcccgttctgctggttgtcgacgaggcgcaagatctggtgtcgcatgaggagcttgccatccttccgaaggctcgctcgctcggtctgtgcgcgttgtactccactcaaggtctcgacggcctccaggtcgcactccaggacgaacaggcgacgatcatgttgctcgatcagttccgctctgttgtgagcatgcaagtcggctctgaaatgaccctcgattatgtatctcagcgccttggcgctgcgcctcgcgtcgttttctgcgaagtcgcggccaacaccaccgacccggtagccaccgcaaatctgtatggggccaatgctggtggttattcgacaggtactctggccgccagagcgcagacatccgacgaaatgatcaaagttggccgctcgtatagccatgtcggccaggcaatcagcactgtctctgagctggccaaaaaactgggcgctgaacaggcatggcagcagctgccggccgcaattcgccgcgagcgacctgcgggcagcgtcaagattggtgaaatcccgctcgtgtcgcccgatgagatccggtcgctgacgatgaataagttcaccgcgctcgcgtcggtcaaccgctgcgggactattcgtcgcgcccagatccggctcaatcccatattcgcattcccgagcgaaacgaaaaccgtactggccgctgaggaggtggcagcatgaaaaactcttccgctcatctcctcgcccagcacggcgagctgctccaggtcagcgctgttatcaccggcgagcccctacacgacaaggcggggcgcatcctgaaagcgatcggcgtcgctgcgctctgcatcgccgttgcagccggcgcgggccacgttacccagggtatccgcgaagaagctgctcgcgtagcggttgcggagaaagccgaggcggaacgcctggccaaggaaaagcgtatcgctgcggctaaagttgccggactgcagaagcgcctgacggccatgcagacacagatcagtaccaagcgtgatgcgctgcaggagcgtttccagcggctgctggcggacatagataaggatccagcagttgccgaaatgctgcgccgatatccagcaccgtacaagccgctccagggaattgatcccgtcgcgttcgaggccttcatcgacctagatcgcgacagctggattgcgactggcaccagtccgaaactggatgagcattatcaaactgaaaacgccaagatccaggaaggcattagctatctggacaaaatcaaccgtgagctacagctgaaagatcccgcgtccccgccgaagccggcagcttctcgctctgtgtcggccgcgccagcagcacccgcgccgctcatgccgctggaaacttcagcaccctcgccggcggcgaagccgcgcgcggcgcccactggtgtgcctggcaaggtccaggtcctggactggtaatcttgtcggctcgcgccttaaaggatcccggccttggccgggatctttatgcccgctccgcgggccgagcccagaagggaaaacggtgagtgccgtgctggtaaattcggcgttagaaacgaaaaaaccaccgtgaggtggtttcttcgttaagcactttcatatgtccgcgggtggaggctttcgccctcgtttccctcggctactggattcaatctaaggatattcgcggttgtcgtcaatgcttgctcaacctatcgcgcctcgattgcgaatctgctcagtagctggactatttgctcctggtactcgctgcactcgtccaggagcactgggtcgccggataaccccggtaaataaacttcccagtaaattccgatcgcatcaaggtggatcgcgaaccagtttgaaaattaccgataaaatacattatcgttatattgatgccgccgccggcaccgatgaatttgcgtccatcgtggtcgtgatcgctaatgacgaggggaacccatcaacgaggatgttcccccatgtatgacgacaaccagtgcctgatctgcggtctgcccatcgagccagttgaatggatcgaggatttgagcgggatcggcgatgacttcaccgacctggtgagcttccaggatgacgatgagctgtgctgctgcgcagtcgaggatgaggatgactgaactgactgaaaagcaaactggcgacctactggccgccaacgagcgacgtctcaccgccgctgagttccagagcctggccgaggtgccggccgcggccgagtggttcgcgaacctggacaacccgcgcacgcgccgcgcttaccagggcgacatcgaggacttcaccggcttcctgggcatcacggcccctgatcagttccgtgctgtcacccgggcgcacgtcctcgcctggcgtcaccagctcgaacagcgcggcctggccggggcgacgatccggcgcaagctggcggcgctggccagcctgttcgatcacctgctcgatgcgaacgccgttgcaggcggtaacccggtgcacggggtcaaacggcccaagattgaaaccaccgaaggcaaaacgccggcgctgggtgaccaccaggccaaggcgctgctggaggcaccggatccgtcgaccacgaaaggcctgcgcgatcgggcgattctggccgtgctgctgtaccacgggctgcgccgcgaggaggcagcacgactgaccgtccaggacattctggagcgacgcgggatcaaacatctgcgcgtgcacggcaagggagggaagatccgctatctgccgctgcatccggtcgccatggaacggatccattcgtacctggaagcctcagcccatcagcttgaacagactgcagcaccgttgtttgtgccactgcgaggccggaaaacaggggctggaatctcagcggaggggatctatgccctggtcgggatctatgcccgggctgccggcattgaggtcgccggtctgggtgttcacggcttgcgtgcgacggccgcgaccaatgccctggagcatgaggccgatatcgccaaggtccagcagtggctagggcatgccaatatcagcacgacgcgcatatacgatcggcgagcttccagaccggaggactcgccgacatataaagtgcggtattaggcaccgccgccctgcgggggctgtggcggtcggaatggggtaatcgccttgctgatagatccagtcagaatctgacggctgctcatagaccgcccccccataatcccctgcatcgagttttcgtaaggattgaggcccggttcgcttagcgaaatcatattgagcacactacgggggaaactggtgatcaactgagcactggtaacgactacgttccagctcagaaggattgtcacaacaaccatcagcaagccgccgatcaggatgccgccgaggctttccagcggacgcccgacatcggcgacccccggatcaaaaatcccccaaagtcccatcgccatagcctggaccatggccaaaccaacggcgctgatcacgatcgctgcagctagtccacccacggccaaggcaggatagagtccgatgaagatgaaagcgttccaacctttggcggagagctgggaagtgtgttcttcccccttcggcgcagccatgccggcactccatagggtcacaccgaagaacgtcgtcgccactgcgacgagccagctgattgcccccatcagtccataaattgcgaataacaacggcatcacgtagccgagcagcccgccggagataatcatcacgccgccaactgccttgggtagcgttccatcggtgattgagctcaaaccaggaatatattgggctatcgtcccaccagcaaaaaagccaatgccagtgccaacaagcgagcggccccatgctgcaatgttgtgaatattttggttgctcgggccggtcgtaagcttgaggatatcgagcgaaaaaactctggccagcagcgacttttcagcaccggtgttgcctggttgaatttgagcaagagcttcactttcgacaagttttgaaagcgagtcgcccggggtcatcgccgacagcgtggactttggcatcatctgtgcggtcgcgccctctgcgtagctcgcagcacgtgagaagtcgctcgctgcgcgcagcacgaaagtgccgccgagcatccaaccccagttttttacttcgtcaaaatacgcctcgctgcgcgccgcttgatcggtggctatagttgtggcaatcgcgctttcgacagttttcttgtaccaatctgctgtttgagaggtccagttaatgctctcctcgaagaaccgctttgcctcagcaggacttgccgatccgtctcgcagagagattgcctgcccaacagcgtgttcgactaaactaatccagatctgtcgctgcgctgctgtaatgcccgcttcaatcgatgctgagttattttttttgacctgcgcgtattcgtccgagcatgtcatggacgatagccaaccggctttgcaaaaccagccttcagtctctagctcacgcccaactgttccgtccactgcatccggctcgattagcccttgcacccccatcgcaacggcgcgagcgagatcgtcgcttggtggtatcaggggtatttgcagagatcgccccgcgttagcgatatatacacccgcagcagcactaccggaagctggatatttatcgccatgaacttgattccacctgactttcagtgcttcttccgccagtgcacgccctgtcagatcaatgagtttgtcattaggatccttgaaaactttgagagcagctaattgtgtcgccgatactttccaagagttgagcatatccagagcaactttggcatccacctcaacttgatacttaggatctttaaataagttatgtcgatgcatcagttcgaacgcattgtgttgcatcgtgtcgccaaattcggccgcagatttggagacacctgcgacaagagcgtgtcccggcgtcaacgtgatcggaatcccgccagcactagagacagggataaccggtgcaattaaagacaaggcgaagatcatccgcagcgggtagaaaaaagcctcgtttccatcttttgcaccgaaaaaattaccgttgtttttgagtcgaaaaataccaagaaacatgacccaggccgctagagcgccgaacatcgcgaggccaagtgttgagaacgcggacgcaaagatcgttagtggtgttacgtcctgcgcaacaaaatcagtaacgtctgatgagtcaaatatccagcgcccaaacatccaggataaaaccaactgagaaaaactattcattattagccctcacccgaacttggtaatcagccggcaacgttttaccgacaagcaaaatcggcttacgaatgacttccctcataaattttattgctgatggggcgctttgcgaataggccatattcatacgatatgcattttgaaaaagcatcatgcacaccatattcataaaggccagatttgcaaaaaccgtcaagctgcctcggctccagtttgcgactagattaccaagcaccacagcaatactaagaataagaagcgcattaacgaacaaaagtgacttataggcacgccgcaatgagtcagtggtagtaatgctttctacgcacattcgatcccagagcagtcgatcatcaatttctgccagttcgcggtcagctttcgcctggtcacgaatagccttgaaccagcgataaccccctttaataaagtagatcggcaagctaactgaatatttcagctcgcgtgcagcattcttcgtctggctgtagccggtcaaataacctgcgactgttttgagcttactcatgatcagcctcactggaataaactggtggaactggaaccggcggaacctgtatgtcagcgaatatatttgggtgaggcattggtgtcgcttcacgccctggaacaacaaggccaaagtagataattaagccaatcccaatcgcccgtggaatttttactgaggcctctttaagcagcatttctaatctcctcacctaagattatttctacagtcccagccagggccgctattacgtgagcgtcgtgctcacagatttcaggtaattcgcccgccttgacttggatctcacggagaacagctaaagcgcggttaagtttatccgctgtaatgctcatactctttcctttcgattttctaatgactaaattttaagagctggcaccaaaaccttccaattgcatatttctaatcatgcaaatatttttgcaattccgtcagcatataataatcaaatatgacgaagaatttagcgcccacaaccctcaaactaatagctataaactatgtcttaattattaatatcgcacccacaaaaaaccccctcattgagggggttatttgcgaagcttgatcagtaccggcgaagtattgcggtcatctcgttgtagaactcctggggatgctcaccatgggtctcgatgtcctcctcagctacatatgcgcgccaagtgccattctcaaaaacaaacttaaatccatcagtgcttgctgttcggcgattgacgccgccgtagttgtcaatgggacggactttttcgacgccatcgatgaccagggataaatagccggtgtctggattgctttgctcattccagaaggtcagttcgattttttttgccttgggtgtgccgagtgcatcctccagatattgcgaggctttcgcactgtaaactgcgtcagtagtcgcagctttcggcatgacctgattcatcttctgttcgccacacccaaccagggcgaccagagccagcactagtatggcgattttgattttcatgatttcagtcctctttacttcgcaattttcagagtgagcaaggccatgtaagcagctgcagtcacgtacagcattgccagaactgcagatccagcagttgtttgcccggtgtgagcggcgtatgtcaggccggcgatcgcaaacggccaggtcatcgctgcagcgccgcaaccgaacaccagagcaaacatcaccagagcagcgagccagcggaaaccagggatcgaaacatcacgaccaaagtcgacacaggcctccaggccggcgaccagaaagcgcactggactgcgagcgatctggcgagcggccgtgaatccgggccagaaaatactaagtgcgttcatcgtttatctcccgcaccaggtcctgctgcgcttcgcgccaggcctggatcatctgtttaacctcaacagagccgtgatgcagtttttcgcgtgtacctggagcaagccggatcctcgtgctggaacccatctcggcatatacgccaattttgatcttcagttcctcaagctccatcaggtcaacagcaccggactcaaccatcagtgcgaccgcttccaggtgctcgccctgcatcaggagcagggcgacatccaggcttggcggtggagccaggcgcaggctcattactgagccttatccatggccacgggctggatcggtgccttgagtcgaatctcaacgcggcggttctgcgccctgccctcctccgtgccgttgcttgcgatcggctgggacgggccagcaccgtagacctggatgcgagttttattgataccctggccgatcaggtgtttaccgacgctgatggcgcgcttctgcgacaactcgatgttgctggcattgccgccaacgttatctgtgtggccagtgacctcgacgttgttgtcagcgtaggacttgaacgagcccgcgagcttgtccaggttgaatgccgccgccggcgacagctcggtcgagccagtgttaaaagtgatcgcgcccggcatcaccagcttgatgtcgtcgccttggcgctgcacttcgatgccagtaccggcggtggctttacgcagttccgcctcttggcggtcggcatagacgccgtaacccgcgccggccaggccgccgataccggcgccgatgagtgcgcccttgccgcggttgtttttattgatcaatgcgcctgcagcggcgccggcgatggtgccgatgctgccccaggtcaaggcctggttgcgcgacccgtctttgtcggtgggggcgaggttggcgcagccggccagggagaggatgctgatgatgagcgaagcggagataatctttttcattgtcgagtcctttactgcgactggttgatttggtttgcacgcaatggcatgcgaagccgcgggagcggcagatcaactggtgtcacagcgaagacccgactgggcttttttagttattgcctcccctaccctgtcgctgatcctggtaggttcggtttatgcatcttacgccagttactgagcttacgcaacttacataacacaaataaattaaataagttacttctgttgcacggcttgcagaaggcgtgagatttcatcctcgccctgctccgagaggagggctactgcagcacggataacatcggacttcgaagccctgaatccgcggggaatgaggctcagtcggtcgatttctttatcaagctcatcggtaagcgaaaacgtcacccgcttatataccttggaaggtgccggcttcgcagcggcagcgccgttcttgccatcgatctttgctgcattgataaagtcatcagctgctggggaggttgcagcaggattagcagctcctttacgcaagttaccgacacccatcacttagccccccagagttctgccgcgatcatttcgatttcttcgactgcccgagggtcggttccgacttcaagcacggacgatccattctcatcggcgtcgtcatagacgttgcgcgcagtggtaaatacctggagaggttcaaggccatagctagcgcatgcagctttcgaatcgagtatccgctgaatctgactggggagggcaggggcttgagtaacgattgcgcgagccaccagatcggggttcacgcttttagccagcgtaatgagttcttcaacatgagccaaggtcttgagatcgcgacgcttaggccggaaaggtagaagcgcatgggttgctacggtgagagcggatcgcagagctacagagtcagcgccgccagcatcgacaacgatcgcctcatagcgcttagctcggtcgaggagcgttttacgaatgtcaccgtgggccgattcgacctggagatcctgcagttcaggattctgctcgcgctcacgcgcccagtcgattgacgtgccctgtgggtcagcgtccagcagcagcacgtcagagccctttctttgcagccacaccgccagattctgagcgatgcagctcttgccgctcccacctttctctccgccgagcaccaggatcatttggttcatctgtgtacccttcatcagttattgaagttgcactacttatgtaagtcgaacaattacacaagctcggtaacttatgcaagttattcgtcttatgccgatttccgcgcgagtcgcttgcctgttatttgtcatctgctattataacgttatctgttatttgttatccgttatctgttacagagggatgcgtcatggcgacagtcacacaagagcgggtttatgcagcagctgaggccattgaggccgctggcggacgggcgtcggtgcgcgctgtgcgcgatcacctgggcggtgggtcgcccaaccagatcaccccattcctcgcggcctggcgggcgaaaaagcctgtcgtcgctgctgccgagatccagttggatccgcgtatcggtcagctgatcgctgagcaagttcgaggcgccgccggcgaggctgcgaagcgagctgacgagcgcgctgctgaggccgaggacacgctcgcgctatgccagcaggagaacgcagaaattgccgaacagttggccaccgcactcaacgccctggatgagtcgcgggccaaaggcgagcagcaggcaggcacgatcggcgaactgcgcgaagaaattgagcgcgtgcgccgcgaagctgatgaggaggtcaccgaggctcaggcccgcgctgatcgcgagcgcgaatctgccgaaactgcgcgccaggccctggctcgggccgagctgcgtctcgaagcgctgccgcgcctagaggccgaggtcgagcgcctgcgcgctgccctggaggaagctcagtctggccgtcaagtcgctgagcaattggcagctgtcgcgacggcaaagctggaagctgccgcgcagcgtgttgaagctgctgaggaacgcgagcgcgatacccgccagcaggctagcaaggccctggaaaccgctgagaaggcctcgggcgaagctcatcaggcgcagatcgccctgcaggccactcaggcccgcctggagtcaacgagtcgcgagctcgaaaccgcgcaagccgctgctacagaggcgaaagcggaactgaaagagatccgcgccgagatcaagaaggcctcgaaaggggagggtaagtgatggctacagcaatcgattacgccggcgcctggaagcgcctgaatgaggctctggcccggaacgtagaccaggccgaaggcgatgccgagatgtttgccttcttgctcacgtcgacactagccgcattcggctcgcaaggcctcctcgatgacaaagctgcaacccgggcgatcgaattgcttcacgagctgcaccaggtagaggtttgacatggccacgtcgatggcggtgccggtaccggagatccaggagcgcgatttcgcgctcgactgggtgaagtggctagccctggtggccatgatcctggaccactcctggttcattctgccaccagaatggcaggagcccggacacggcctgcgtgtagctggcaggctcgctttcccgctgttctgtctggccatcgccgcgaacatcgcccgccagccggccggttttccgacaggcctcggccgctacctgggcggtatgctgtttttcgccatgctgagccagccggtctacgcgaagtttttcgaaaacggcatgctgaacattctgttcacgctcgcggtcggcctgccgatagccgcggccgtccagcatcgaacgccggcgctgatcgtcggtgcgctcgtctgcacggccgtcgcgtacgcatacggatctgtcctcgcgtacggaacctggggcgtcctgctgcctgccgtcctggtggttgcaatgcgcgtcagggactcggagctcttccaggtaatggccatcgtctcggggatggtcgcgctgttggccaacgccgccctactggcagttttacgggatctgacgcccgttcaatatagtcaagtcgccgccatcgcagtggcgccgctgctagggctgctggtattgcaggtcaaggctccaccagtgcggccggtgggccgctggatgtacgccttctatccccttcatctcctcgttctaagctcgctggccatcgcctggcactgactcattctcaccaggcgccgccggaatttctggcggcttgccgctcgcaccgtatctgaaatcactttcttcccttccggggggcttttgcccttggccgcaaggccgcaccgcaggtctgtggtgagttgttcgagcgaaagccgggtcaaggggttggggcggcctgcaggcgcgtagcgccgaagcctcggccccttgacgcgactgtagcgacccaaagcctcagcgaagggtgtgggcggtgctcttccgcccgcaccccgagcactcggcggcccgaggctcccctcgcagggcgaggggcgggggggagtggatagattacgggtgcaggggcgttacgctcctgccgagggtctggggcgagcagccccagggtgtttccgccccgcggcgaagccgcgaagtgggtgggcctagatggcttttgctctatgttgcgtcttgcgaattagtttcggtatgcacggtccggggggcgccgggtcgggcggagcccgggcgggcatgagccggcgggggcggagcccccaggaggcggcggcgcgattccgcgacgggttaaatataggttaaagataaggttaagtggttcgaaaccgggctgtagaccaagtaccacgcggcttccagaaaacgcccggaggagttatgccaacggatggaggagttatgccaatgaacggaggacaaatgccaatggcatacccccgcttggaggagttatgccaatgcatgtggataactatttctcgcggtgccagcgggtcttcaggagcaacgtttcgcccgctttttcctggtagatctcggcttttgtgataatgcctgctcgctccagttcgtgtaggcctctcttaagccccttgcgcggcgctaggaaggatttcagggtgcgatagcggcttgggccgaatagatcttcaaccgcggcgtgatgccagcccagaggctgctcctcgacgtatgcgcgcaaccacttaccgaagtcgctcgggcgccaccacttaaccatcctgcggccagctttcaggtagaactcgtgatcctcgataatgccaagctcctccagttcggtgagagcagccggcaagccgtagtgagcgtcgaggaagttcttcagggaagagctcgcagcatagaagtcgcgcagggtttcgactgcagcgtaatgccaattccccggctcatggctggcgacataattctggagcagacgcgacataccgtgagtcatctgcaagcgagcatcaaagtcgatgaatgccagttcgcgtttgctatagaaggtcgcgatttccggatcgagcgctagccaataatcggattccgtccaagccatgtctttcaccaggcggaacatcttgcctttcccttcgccgtcttcgatgaacatcgtcgctgaagctaggcgctgcagagagtctttcagccacttgtaacccgaggttccgggttgccgaccgattgcctgcagaaagtgagaacgtacaaaatggatctggccacctggtgcgaggccttggcttaatcgcattgcgtgtaggaagacatcattgtcgccagcatcaagctgctcgcctgtgtagaggatcgagacatcgctgcggctggccaacggggttttaacgaaactacggcggcgccccttcttcacagcagcgaaaaggctcgttcggatccacttgttgggcatcgccgatttttcttcggggaacaggggtatctgtaccttcacctctggcttttctgaggtggccacctcttcctgaactgctttcagcagatcctgttgctcagccttatctgcgctggccttctgcgtgttacgcgcaagcttcgccgccatgcgagcgttcagccctgcttttgatacacttttctctgtcattacgatctccgtcatcgaaatggcatggggtgggccgaaggttacgacttcggcctgccttactcttcttccttcgcgtcgagaatcaccccgcggttatcgacgaactcgacaccagcggcgatgaaagcggcctcaacaccgtcatgtgaagctggatgcagcgttcgagcgccacgctcgaagctgctgatggtctgccgcgtcactccagcgtgctcggccaaagtagcttgatcccatctgagaagcgctcgcgctgctgcgcattgttcgggcgtcattgccacctcaatcgttttgcataaagttcgatattttgcattaaggaaacaaatggcggacttatgccaatgatggttaccgccccgagatgagccttgcaaggccttctcgttggtgcctactgttttgcattatggaaaatattttccctaatgtaaaacaattaggctcaattggcgaaacaagaggaggagttatgccaacgcaattgcaaaagaatacggcggcaagaagcgggaggggggggattcagcagcaccgccgcttcgcgggtggccacctcgggtgggatacattgaatatcgacggcacggcgccttcgcgatcaattcctgcaggtgtcagcgtcagttctgctaatccggcgcagaaggctgcgcctgctgcgctatccagttccgaatgtactccaagacacgattagcgccatcgactgtctcggcgagttcgatcgggcgttcaccccccatgtacgggttcggctgttccatccatttgtgcgcggcggccttgctaccacggacaggaatagctagatccaggatctcctgcagcagctcaggttgcccgtaccaagattctggcttagtggttgccttccgaccagggatgacgcgaggtaactggcaagcagctagctcactaacgttgacgtactcccgcttccaatgcgcgagcttcacgaggtcggtattcggcgggcgcgtgtgatcagtagtcggcacaaccacgccgatcaacacattggtatgggccctgatcatctccagcgccggcgcaatgtccgtgtcgttggtgacgatgaccgcgtgatcgatctgcccggtgatcgcgtcgtggtaggcctgcagggctaggttcacgtcgctctgtttctcttcgaccttccaagcttggatctcctggcattcgcggggagccctatcgggatcctcggcgtcgacgatcttcaccttcattttgttgacagcgtaatagccttcgatcagttcgattcgaccgtcatgcagcttgcgcaacgctgtgtggtagcgcgcctgagacgatactgagtcgggagccctggcaacggactcgatgatcttcgctgtgaagaacttgatcgagggggagggcagcagggccgattgccgaatatggccatcaccatccttgaccagcgcagacggcaggatgtgtttttcgaagaggggcagcagatccagccacttgtgggg
